(19) United States
(12) Patent Application Publication
(10) Pub. No.: US 2015/0044187 A1
(43) Pub. Date: Feb. 12, 2015

(54) Brain-Specific Enhancers for Cell-Based Therapy

(71) Applicants: Axel Visel, El Cerrito, CA (US); John L.R. Rubenstein, San Francisco, CA (US); Ying-Jiun (aka, Jasmine) Chen, South San Francisco, CA (US); Len A. Pennacchio, Sebastopol, CA (US)

(72) Inventors: Axel Visel, El Cerrito, CA (US); John L.R. Rubenstein, San Francisco, CA (US); Ying-Jiun (aka, Jasmine) Chen, South San Francisco, CA (US); Len A. Pennacchio, Sebastopol, CA (US)

(73) Assignee: THE REGENTS OF THE UNIVERSITY OF CALIFORNIA, Oakland, CA (US)

(21) Appl. No.: 14/512,306

(22) Filed: Oct. 10, 2014

Related U.S. Application Data
(63) Continuation of application No. PCT/US2013/036030, filed on Apr. 10, 2013.
(60) Provisional application No. 61/622,467, filed on Apr. 10, 2012.
(60) Provisional application No. 61/676,606, filed on Jul. 27, 2012.

(51) Int. Cl. G01N 33/569; C12N 15/85; G01N 33/50; A61K 35/54

(52) U.S. Cl. CPC G01N 33/56966; A61K 35/545; C12N 15/85; G01N 33/5014
USPC 424/93.7; 536/24.1; 435/320.1; 435/252.3; 435/34; 435/254.11; 435/419; 435/325; 435/7.1

(57) ABSTRACT

Herein are described a set of novel specific human enhancers for specific forebrain cell types used to study and select for human neural progenitor cells. This approach enables the ability to generate interneurons from human ES, iPS and iN cells, making them available for human transplantation and for molecular/cellular analyses. These approaches are also directly applicable to generating other neuronal cell types, such as cortical and striatal projection neurons, which have implications for many human diseases.

### CROSS-REFERENCE TO RELATED APPLICATIONS

[0001] This application is a non-provisional application of and claims priority to International Patent Application No. PCT/US13/36030, filed on Apr. 10, 2013 and claims priority to U.S. Provisional Patent Application Ser. No. 61/622,467, filed on Apr. 10, 2012, and to U.S. Provisional Patent Application Ser. No. 61/676,606, filed on Jul. 27, 2012, all of which are hereby incorporated in their entirety for all purposes.

### STATEMENT OF GOVERNMENTAL SUPPORT

[0002] This work was supported Grant Nos. HG003988 awarded by the National Human Genome Research Institute, Grant Nos. MH081880 and MH049428 awarded by the NIH-NIMH, Grant Nos. NS062859A and NS071785 awarded by the NIH-NINDS, by Grant Nos. RB2-01602 and RC1-00346-1 awarded by the California Institute for Regenerative Medicine, and by Contract DE-AC02-05CH11231 awarded by the Department of Energy. The government has certain rights in the invention.

### STATEMENT REGARDING ATTACHED SEQUENCE LISTING AND TABLE APPENDIX

[0003] This application references and incorporates by reference the attached Tables 1-11 and sequences SEQ ID NOS:1-159 found in the Sequence Listing attached also found in computer-readable form in a *.txt file entitled, “2952US_SequenceListing_ST25.txt”, created on Oct. 9, 2014.

### BACKGROUND OF THE INVENTION

[0004] 1. Field of the Invention

[0005] The present invention relates to enhancer sequences and their derivative structures, and compositions and methods for generating embryonic stem (ES) cells, induced pluripotent stem (iPS) cells and induced neural (iN) cells and cell-based therapies, especially therapies for use in mental and brain diseases and disorders.

[0006] 2. Related Art

[0007] Cortical interneuron dysfunction contributes to the risk of developing autism, epilepsy, bipolar disorder, schizophrenia, and dementia (Powell et al., 2003; Cossart et al., 2005; Andrews-Zwilling et al., 2010; Marin, 2012; Stanley et al., 2012). Cortical interneurons are born in the progenitor zones of the medial ganglionic eminence (MGE), the caudal ganglionic eminence (CGE) and preoptic area (POA), and migrate tangentially into the cortex (Anderson et al., 1997a; Wonders and Anderson, 2006; Gelman et al., 2011). Several transcription factors, such as Dlx1&2, Nkx2-1 and Lhx6, regulate interneuron development. For instance, Dlx1&2 are required for interneuron migration to the cortex (Anderson et al., 1997a; Anderson et al., 1997b; Cobos et al., 2005; Polley et al., 2006; Cobos et al., 2007; Petryniak et al., 2007). Dlx1^{-/-} mice are viable, but, due to late-onset interneuron loss, develop cortical dysrhythmias and epilepsy (Cobos et al., 2005). Nkx2-1 specifies MGE identity; in Nkx2-1 null mice the MGE is transformed towards LGE/CGE identity and lack MGE-derived interneurons, in part because they fail to express Lhx6 (Sussel et al., 1999; Butt et al., 2008; Du et al., 2008). In turn, Lhx6 is required for differentiation of Parvalbumin⁺ and Somatostatin⁺ interneurons (Liodis et al., 2007; Zhao et al., 2008).

[0008] Heterochronic transplantation of rodent embryonic MGE cells into neonatal cortex or adult hippocampus results in their efficient dispersion and integration within host circuits (Wichterle et al., 1999; Alvarez-Dolado et al., 2006; Waldau et al., 2010; Zipancic et al., 2010). Furthermore, studies have demonstrated a therapeutic proof of concept that transplantation of normal MGE cells into rodent models of neuropsychiatric or neurological disorders can suppress seizures, ameliorate phencyclidine-induced cognitive deficits and partially rescue Parkinsonian symptoms (Baraban et al., 2009; Daadi et al., 2009; Martinez-Cerdeno et al., 2010; Waldau et al., 2010; Zipancic et al., 2010; De la Cruz et al., 2011; Tanaka et al., 2011).

[0009] While fetal MGE is a potential source for human transplantation, generating MGE cells from stem cells is advantageous due to limited availability and ethical issues surrounding the use of fetal tissue. Thus, several groups have embarked on generating MGE cells from embryonic stem (ES) cells (Watanabe et al., 2005; Eiraku et al., 2008; Danjo et al., 2011).

[0010] There are now viable experimental approaches to elucidate the genetic and molecular mechanisms that underlie severe brain disorders through the generation of stem cells, called iPS cells, from the skin of patients. Scientists are now challenged to develop methods to program iPS cells to become the specific types of brain cells that are most relevant to each specific brain disease. For instance, there is evidence that defects in cortical interneurons contribute to epilepsy, autism and schizophrenia.

[0011] We have recently demonstrated that transplantation of immature interneurons from an embryonic structure called the medial ganglionic eminence (MGE) into the cortex of epileptic mice (Kv1.1 mutants) suppresses their seizures (Baraban et al, 2009). Thus, transplantation of interneuron precursors into humans who have treatment-resistant epilepsy could be an important therapeutic approach. However, those experiments are not yet feasible as current methods are insufficient to generate and purify human MGE progenitors.

[0012] Mouse and human ES cells lines have been generated that express GFP under the control of loci that mark MGE cells. A mouse ES cell line (named: J14) expressing GFP from an Lhx6 BAC transgene can differentiate into Lhx6-GFP⁺ mature cortical interneurons after transplantation (Maroof et al., 2010). Human NKX2-1^{GFP/w} ES cells express GFP from the endogenous NKX2-1 locus; NKX2-1^{GFP/w} cells were differentiated into NKX2-1-GFP⁺ basal forebrain progenitors that further differentiated into GABA⁺ and TH⁺ neurons, and PDGFRα⁺ oligodendrocytes (Goulburn et al., 2011).

[0013] Others have described stem cells and identification or purification methods such as, Reubinoff, et al. U.S. Pat. No. 7,947,498, Embryonic stem cells and neural progenitor cells derived therefrom; Reubinoff, et al. U.S. Pat. No. 7,604,992, Generation of neural stem cells from undifferentiated human embryonic stem cells; and Slukvin, I et al., US Patent Publication No. 20110117135, Method of Forming Dendritic Cells from Embryonic Stem Cells, all of which are hereby incorporated by reference. However, there are significant hurdles to identify/purify specific cells states from differentiating human ES/iPS cells. For instance, current methods of MGE induction are inefficient, especially in hES cells, with <1% of the cells expressing the appropriate markers. Thus, there is a current need for robust methods to generate and purify human MGE progenitor cells.

### SUMMARY OF THE INVENTION

[0014] Herein we describe a strategy for the use of human brain region-specific enhancers to select for interneuron precursors produced from human ES cells. In particular, we have: a) used ChiP-seq, comparative genomics and transgenic mouse data to identify a set of human transcriptional enhancers (SEQ ID NOS:1-145) that are shown to be brain region-specific enhancers for the selection process (See FIG. 1); b) devised a molecular cloning strategy to construct vectors for driving selectable markers (See FIG. 14); c) devised protocols for detecting reporter gene activity driven by such constructs in brain regions and in differentiating stem cells; d) devised a strategy to use these constructs for the differentiation of mouse and human ES cells into progenitor cells of that resemble the MGE and other brain regions; e) devised a strategy to use these constructs for the induction of neural cells from non-pluriopotent cells; and f) devised the use of FACS cell sorting to purify the cells to enable cell transplantation for phenotype analysis (including the identification of cell surface molecules, that will enable other purification approaches).

[0015] Thus, the present invention provides for an isolated polynucleotide comprising a sequence selected from one of SEQ ID NOS:1 to 145. The isolated polynucleotide further comprising an inducible promoter and reporter gene. In some embodiments, the isolated polynucleotide further comprising a stem cell-associated gene. In other embodiments, a vector comprising the isolated polynucleotide comprising an enhancer selected from SEQ ID NOS:1-145. In one embodiment, the enhancer selected from SEQ ID NOS: 83, 84, 99-104, 106-108, 110-118, 120-128, and 144-145. In another embodiment, an expression cassette incorporating the vector is also provided.

[0016] The present invention further describes a set of enhancers for driving expression in and labeling specific subregions of the mouse or human forebrain, the set consisting of SEQ ID NOS:1-145.

[0017] In some embodiments, stem cells, induced pluripotent stem cells, and reprogrammed cells can be generated and isolated using the present set of enhancers. In other embodiments, the cells generated through reprogramming or induced pluripotency can then be used for screening analytes or drugs for therapeutic effects. In other embodiments, the cells generated through reprogramming or induced pluripotency used for transplantation in an organism or subject.

[0018] A method for detecting cell differentiation comprising: (1) providing a vector having a promoter, reporter gene and an enhancer selected from SEQ ID NOS:1-145; (2) transfecting a stem cell with the vector; (3) directing differentiation of the stem cell to the desired cell type and expression; (4) detecting cells of the desired cell type by detecting reporter gene expression.

[0019] A method for detecting and isolating cells having a specific cell type comprising (1) providing a vector having a promoter, reporter gene and an enhancer selected from SEQ ID NOS:1-145; (2) transfecting a stem cell with the vector; (3) directing differentiation of the stem cell to the desired cell type and expression; (4) detecting cells of the desired cell type by detecting reporter gene expression and (5) isolating the cells of the desired cell type.

[0020] A method for generating stem cells comprising the steps of: (1) providing a vector comprising a promoter, a reporter gene, and an enhancer selected from SEQ ID NOS:1-145; (2) transfecting a stem cell with the vector; (3) directing differentiation of the stem cell to the desired cell type and expression; (5) inducing reporter gene expression; (6) detecting cells of the desired cell type by detecting reporter gene expression and (7) isolating the cells of the desired cell type.

[0021] A method for screening or assaying drugs for therapeutic effect on neural cells, comprising (1) providing a vector having a promoter, reporter gene and an enhancer selected from SEQ ID NOS:1-145; (2) transfecting a stem cell or programmable cell with the vector; (3) directing differentiation of the cell to the desired cell type and expression; (4) detecting cells of the desired cell type by detecting reporter gene expression; (5) isolating the cells of the desired cell type; (6) contacting said cells with a drug to screen or assay for desired therapeutic effect; and (7) detecting response of said cells to said drug to determine the therapeutic effect of said drug on said cell.

[0022] A method for driving expression in specific forebrain substructure regions, comprising (1) providing a vector having a promoter, reporter gene and an enhancer selected from SEQ ID NOS:1-145; (2) transfecting a stem cell with the vector; (3) directing differentiation of the stem cell to the desired cell type and expression; (4) detecting cells of the desired cell type by detecting reporter gene expression; (5) isolating cells the cells of the desired cell type; and (6) transplanting said cells into a subject to drive expression in specific forebrain substructure regions.

[0023] A method for detecting induction and differentiation in induced pluripotent cells comprising: (1) providing a vector comprising a promoter, a reporter gene, stem cell-associated genes, and an enhancer selected from SEQ ID NOS:1-145; (2) transfecting a non-pluripotent cell with the vector; (3) inducing pluripotency in the non-pluripotent cell; (4) directing differentiation of the induced pluripotent cell to the desired cell type and expression; (5) inducing reporter

[0024] A method for generating induced pluripotent stem cells comprising the steps of: (1) providing a vector comprising a promoter, a reporter gene, stem cell-associated genes, and an enhancer selected from SEQ ID NOS:1-145; (2) transfecting a non-pluripotent cell with the vector; (3) inducing pluripotency in the non-pluripotent cell; (4) directing differentiation of the induced pluripotent cell to the desired cell type and expression; (5) inducing reporter gene expression; (6) detecting cells of the desired cell type by detecting reporter gene expression and (7) isolating the cells of the desired cell type.

[0025] A method for screening or assaying drugs for therapeutic effect on neural cells, comprising (1) providing a vector having a promoter, reporter gene and an enhancer selected from SEQ ID NOS:1-145; (2) transfecting a non-pluripotent cell with the vector; (3) inducing pluripotency in the non-pluripotent cell; (4) directing differentiation of the cell to the desired cell type and expression; (5) inducing reporter gene expression; (6) detecting cells of the desired cell type by detecting reporter gene expression; (7) isolating the cells of the desired cell type; (8) contacting said cells with a drug to screen or assay for desired therapeutic effect; and (9) detecting response of said cells to said drug to determine the therapeutic effect of said drug on said cell.

[0026] A method for driving expression in specific forebrain substructure regions, comprising (1) providing a vector having a promoter, reporter gene and an enhancer selected from SEQ ID NOS:1-145; (2) transfecting a non-pluripotent cell with the vector; (3) inducing pluripotency in the non-pluripotent cell; (4) directing differentiation of the cell to the desired cell type and expression; (5) inducing reporter gene expression; (6) detecting cells of the desired cell type by detecting reporter gene expression; (7) isolating the cells of the desired cell type; and (8) transplanting said cells into a subject to drive expression in specific forebrain substructure regions.

[0027] A method for driving expression in specific forebrain substructure regions, comprising (1) providing a vector having a promoter, reporter gene and an enhancer selected from SEQ ID NOS:1-145; (2) transfecting a non-pluripotent cell with the vector; (3) reprogramming of the non-pluriopotent cell to the desired cell type and expression; (4) detecting cells of the desired cell type by detecting reporter gene expression; (5) isolating cells the cells of the desired cell type; and (6) transplanting said cells into a subject to drive expression in specific forebrain substructure regions.

[0028] A method for isolating neural cells comprising the steps of: (1) providing a vector comprising a promoter, a reporter gene, neural cell-associated genes for reprogramming, and an enhancer selected from SEQ ID NOS:1-145; (2) transfecting a non-pluripotent cell with the vector; (3) reprogramming said cell to a specific cell type; (4) inducing reporter gene expression; (5) detecting cells of the desired cell type by detecting reporter gene expression and (6) isolating the cells of the desired cell type.

[0029] A method for detecting reprogrammed neural cells comprising: (1) providing a vector comprising a promoter, a reporter gene, neural cell-associated genes for reprogramming, and an enhancer selected from SEQ ID NOS:1-145; (2) transfecting a non-pluripotent cell with the vector; (3) reprogramming said cell to a specific cell type; (4) inducing reporter gene expression; (5) detecting cells of the desired cell type by detecting reporter gene expression.

[0030] A method for screening drugs for therapeutic effect comprising: (a) providing a vector comprising a promoter, a reporter gene, neural cell-associated genes for reprogramming, and an enhancer selected from SEQ ID NOS:1-145; (2) transfecting a non-pluripotent cell with the vector; (3) reprogramming said cell to a specific cell type; (4) inducing reporter gene expression; (5) detecting cells of the desired cell type by detecting reporter gene expression; (6) isolating the cells of the desired cell type; (7) contacting said cells of the desired cell type with a drug to be screened for therapeutic effect; and (8) detecting any change in the cells of the desired cell type after contact with said drug.

[0031] A method for driving expression in specific forebrain substructure regions, comprising (1) providing a vector having a promoter, reporter gene, neural cell-associated genes for reprogramming and an enhancer selected from SEQ ID NOS:1-145; (2) transfecting a non-pluripotent cell with the vector; (3) reprogramming said cell to a specific cell type; (4) detecting cells of the desired cell type by detecting reporter gene expression; (5) isolating the cells of the desired cell type; and (6) transplanting said cells into a subject to drive expression in specific forebrain substructure regions.

### BRIEF DESCRIPTION OF THE FIGURES AND TABLES

[0032] FIG. 1: Subset of forebrain enhancers identified by conservation or p300 binding at whole-mount resolution. a) A selection of 50 reproducible forebrain enhancers at e11.5 identified in this study. In each case, only one of several (minimum: 3) embryos with the same pattern is shown. Additional embryos obtained with each enhancer construct can be viewed at http://enhancer.lbl.gov. Enhancer elements are sorted by broad similarities of patterns as evident at whole-mount resolution. b) Examples of genes implicated in forebrain development that were screened for enhancers in the present study and for which enhancers are shown in a). A full list of all 329 constructs tested in this study, including annotations of enhancer activity patterns and information about neighboring genes are provided in Table S4.

[0033] FIG. 2: Subset of forebrain enhancers with activity in different subregions of the developing pallium. a) Overview of annotated structures in the approximate coronal sectioning plane shown in b)-s). b)-s) Selected enhancers that reproducibly label subregions of the developing pallium. Enhancers are arranged by their spatial specificities, sorted from medial through dorsal and lateral to ventral pallium. Detailed annotations of all patterns, as well as additional enhancers that drive expression in these subregions are provided in Table 2. Full serial sets of sections for each enhancer can be viewed at the enhancer.lbl.gov website, using the enhancer IDs indicated in the figure panels. MP, medial pallium; DP, dorsal pallium; LP, lateral pallium; VP, ventral pallium; LGE, lateral ganglionic eminence; Se, septum. t) Comparison of enhancer activities between e11.5 and e13.5. Red arrowheads indicate activity in neuronal precursor/differentiation zones, and orange arrowheads indicate immature neurons in the cortical plate.

[0034] FIG. 3: Subset of forebrain enhancers with activity in different subregions of the subpallium and eminentia thalami. a), b), d), e) Selected enhancers that target LacZ expression a) predominantly or exclusively to subregions of the LGE, b) both the LGE and MGE, d) predominantly the MGE and e) the EMT. c) Schematic overview of structures in the approximate sectioning plane shown in a), b), d) and e). Depending on the rostrocaudal extent of staining for some enhancers more rostral or caudal planes than indicated in c) were chosen to illustrate salient features of the respective patterns. The majority of subpallial enhancers drove expression to the marginal zone, but we also observed enhancers that were active in the ventricular zone (e.g., panel d, hs1056). Th, thalamus; EMT, eminentia thalami; CP, choroid plexus; MP, medial pallium; DP, dorsal pallium; LP, lateral pallium; VP, ventral pallium; LGE, lateral ganglionic eminence; MGE, medial ganglionic eminence; POA, preoptic area.

[0035] FIG. 4: Correlation of spatial enhancer activity patterns with mRNA expression patterns of nearby genes. a) To assess overall correlations, the annotated activity patterns of telencephalic enhancers were compared to mRNA expression patterns of nearby genes. Compared to randomly assigned enhancer:gene pairs, there is a highly significant enrichment of cases in which concordant enhancer activity and gene expression is observed in one or multiple telencephalic subregions (P=0.0003, Mann-Whitney test). b) Example of individual enhancers recapitulating aspects of the gene expression pattern. The Arx gene is expressed both in subpallial (blue arrows) and pallial (black arrows) regions, with increasing expression in pallial regions from e11.5 to e13.5 (insets). The activity patterns of four enhancers in the extended Arx locus are shown, two of which drive subpallial (hs119, hs121) and two of which drive pallial expression (hs122, hs123), revealing that developmental Arx regulation is more complex than initially suggested (23). RNA in situ hybridization images: Allen Developing Mouse Brain Atlas (Website for developingmouse.brain-map.org), reproduced with permission from Allen Institute for Brain Science. c-f) Additional examples of overlap in enhancer activity with expression of nearby genes in rostral (top) and more caudal (bottom) areas of the telencephalon at e11.5. In all four cases, there was spatial overlap in activity (green arrowheads), as well as gene expression in additional regions that did not show enhancer activity (dark arrowheads).

[0036] FIG. 5: Sequence classifier derived from high-resolution activity annotations. a) Squares indicate enhancers (rows) active in different telencephalic subregions (columns). Unsupervised clustering (Jaccard's coefficient, average linkage) of telencephalic subregions by similarity of enhancer activity profiles (top dendrogram) largely follows known developmental, functional and topological relations of telencephalic subregions. Clustering (Euclidean distances, Ward's method) of enhancers by similarity of observed activity in telencephalic subregions suggests functional subgroups (right dendrogram). Shades of gray indicate the proportion of decision trees assigning each enhancer to the pallium or subpallium class (for pallium and subpallium enhancers) or to the compound pallium/subpallium class (for compound enhancers). b) The Random Forest (RF) classifier distinguishes enhancers that are active in pallium only (top), in both pallium and subpallium (center), and in subpallium only (bottom). Left: Top 5 sequence motifs characterizing each class of enhancers and their relative contribution to the classification. Additional motifs are shown in FIG. 7. Right: Receiver-operating characteristic (ROC) curves of predictive performances. The area under the curve (AUC) measures the ability of the classifier to limit incorrect predictions while maintaining accuracy in true predictions. For example, the “pallium and subpallium” classifier correctly identifies ˜70% of enhancers in this cluster at a false positive rate of 10%. (C) Luciferase cotransfection assays of 20 subpallial enhancers with either the transcription factors Dlx2 or Ascl1 in P19 cells. Error bars represent SD. See also FIGS. 7-10, and, Tables 2, 6, 7, 8 and 9.

[0037] FIG. 6: Neuroanatomical regions and boundaries used for annotation of enhancer activities and gene expression patterns in the e11.5 telencephalon and adjacent brain regions.

[0038] FIG. 7: Most relevant binding site occurrence for the prediction of three different classes of forebrain enhancers (pallium, subpallium, and pallium and subpallium enhancers), ranked in decreasing order of importance with respect to the mean decrease in prediction accuracy. The panel on the bottom right shows the overall top ranking binding sites and their mean decrease in accuracy and GINI measure in discriminating forebrain enhancers and control genomic regions.

[0039] FIG. 8: Distribution of most important TF binding sites. The heat map shows the over-/under-representation of the most important TRANSFAC and JASPAR TF binding sites as identified by the RF classifier among enhancers active in three different telencephalon subregions, relative to the genomic background. Negative values indicate under-representation (in blue), and positive values over-representation (in yellow). Rows (binding sites) and columns (subregions) are hierarchically clustered and ordered by similarity to each other, using Euclidean distance measure with average linkage in the case of rows, and the Spearman correlation with average linkage in the case of columns.

[0040] FIG. 9: Conservation of putative TF binding sites identified as important by the RF classifier. Each point represents a particular binding site in the TRANSFAC and JASPAR motif databases. The y-axis shows the means decrease in accuracy of the RF classifier when the frequencies of the corresponding TF binding site are randomly permuted across the enhancer sequences. The x-axis indicates the average phastCons scores for putative TF binding sites in the predicted forebrain enhancers. Medians are denoted by gray dotted lines. TF binding sites for which both importance and conservation values are greater than the respective medians are depicted in red, names of selected TF binding sites are indicated. Panel d shows the average across the classifier when trying to separate sequences active in any part of the pallium and/or subpallium from random controls.

[0041] FIG. 10: Multidimensional scaling plot displaying the level of similarity between enhancer sequences active in three forebrain subregions (plot axes represent arbitrary units and are therefore dimensionless).

[0042] FIG. 11. Primary MGE cells in vitro differentiate into Dlx2⁺ GABAergic neurons, but lose Lhx6 expression. A-D″, E13.5 MGE (ventricular and subventricular zone of the MGE) from Dlx5/6-LacZ⁺ embryos was removed from the telencephalon, dissociated and cultured in vitro using the media as described (Walton et al., 2006). Ten days after growing in the proliferation media (10 DIVₚᵣₒ), the cells were differentiated using differentiation media (DIV_{diff}). The state of differentiation was compared during proliferation (A-A″ and C-C″) or after 4 days of differentiation (B-B″ and D-D″) by immunostaining with antibodies to □β-Galactosidase (β-Gal), GAD1 (GAD67), Dlx2 and Class III β-Tubulin (Tuj1). Scale bar, 100 μm. E-K, Lhx6-GFP expression in cells derived from E12.5 MGE (ventricular and subventricular zone of the MGE). The Lhx6-GFP⁺ MGEs were dissociated and cultured in vitro Top row: MGE cells grown in proliferation media for 3 (E), 7 (F), 10 (G) and 13 (H) days. Bottom row: MGE cells cultured in proliferation media for seven days and then in differentiation media for 0 (I), 3 (J), and 6 (K) days. Images are overlay of DIC images and green fluorescent images. Scale bar, 150 μm.

[0043] FIG. 12. MGE differentiation protocol from mouse ES cells and characterization of differentiated E14 cells. A, Schema outlining the MGE differentiation protocol. The black horizontal line: time line of days after initiation of differentiation. Days when a treatment was introduced are indicated (see Materials and Methods for details). From day 0 (D0) to day 6 (D6), cells were cultured with GMEM and 10% KSR (shown in purple) in a lipidure-coated 96-well plate (shown in cyan). Dkk-1 (100 ng/ml) was added on D0 and SAG (6 nM) was added on D3 shown in red. On D6, cell aggregates were collected and transferred to a bacterial grade sterile petri dish in DMEM/F-12 supplemented with N2. Additional SAG (6 nM) was added to the medium on D6. Starting on D9 (and the following days), aggregates were collected either for immunofluorescent staining, FACS analysis, or FACS purification followed by gene expression microarray analysis, or transplantation. B-E′, Expression of Nkx2-1 (red in all panels) with other markers (shown in green): Mash1 (B, B′), Islet1 (C, C′), GABA (D, D′), and Calbindin (E, E′), in E14 cell line on D9 and D15 after differentiation. DAPI nucleus staining was shown in blue in all panels. There are more Mash1⁺ cells than Nkx2-1⁺ cells (and some of them express both proteins) on D9. On D15, both protein expressions are reduced with more Nkx2-1⁺ cells than Mash1⁺ cells. Scale bar: 100 μm.

[0044] FIG. 13. Characterization of MGE-like differentiated J14 (Lhx6-GFP) cells. A-D″, Nkx2-1 expression is shown in red; Lhx6-GFP expression is shown in green; DAPI stains the nucleus blue. A-A″: D10; B-B″: D12; C-C″: D14; D-D″: D16. White arrows indicate cells co-expressing Nkx2-1 and Lhx6-GFP. E, Dlx2 (red) and Lhx6-GFP (green) expression on D12. White arrows indicate co-localization of Dlx2 and Lhx6-GFP. F, Foxg1 (red) and Lhx6-GFP (green) expression on D12. White arrows indicate co-localization of Foxg1 and Lhx6-GFP. G, Islet1 (red) and Lhx6-GFP (green) expression on D12. H, There were only a few Mki67⁺ (red) cells that expressed Lhx6-GFP (green) on D11. I, No Tbr1⁺ (red) cells were detected on D12. J, Olig2⁺ (red) cells and Lhx6-GFP⁺ (green) cells were mutually exclusive on D12. Scale bar for all panels: 100 μm.

[0045] FIG. 14. Expression of MGE enhancers, and lentiviral constructs used to transduce them into primary MGE cells and ES cells. A-D, MGE enhancers driving β-galactosidase expression (X-Gal staining) of E11.5 telencephalic sections from transient transgenic mice. Coronal sections are shown from rostral to caudal (left to right). Each transgene is composed of one enhancer element 422 (A), 692 (B), 1056 (C), or 1538 (D), followed by an hsp68 minimal promoter that drives expression of LacZ (β-Galactosidase). E, Lentiviral constructs harboring each enhancer reporter cassette for making stable mouse embryonic stem cell clones. Each construct is flanked by a lentiviral 5′LTR and a 3′LTR, and contains two separated gene expression cassettes: the first is the enhancer/promotor driving a mCherry reporter gene; the second is Rex-1 promoter driving the Blasticidin resistant gene (BlaR) (Kita-Matsuo et al., 2009). The enhancers tested in this study were: mouse DlxI12b enhancer (a shorter version of enhancer 422), three novel human enhancers (692, 1056, and 1538), and a mouse Lhx6 proximal enhancer/promoter DNA element (Du et al., 2008). F-G″, Enhancer activity in MGE primary cultures. E13.5 MGE cells were infected with lentiviruses indicated (F: DlxI12b-mCherry; F′: DlxI12b-hsp-mCherry; F″: DlxI12b-βg-mCherry; G: 692-mCherry, G′: 692-hsp-mCherry; G″:692-βg-mCherry), followed by three days of culture prior to Nkx2-1 (green) and mCherry (red) immunostaining; DAPI nuclear stain in blue. Pictures are composites from several different fields. Scale bar, 50 μm

[0046] FIG. 15. Characterization of DlxI12b-βglobin-mCherry in E14 & J14 ES cells differentiated toward an MGE-like identity. Marker expression analysis was done with immunofluorescence of sections from aggregates of differentiated ES cells. (A-C) mCherry expression (red) driven by the DlxI12b-βglobin enhancer/promoter; Lhx6-GFP expression (green) in panels A-A″ (D11 aggregates), B-B″ (D13), C-C″ (D15). D, DlxI12b-βg-mCherry (red) and Nkx2-1 (green) expression on D13 of differentiation. E, DlxI12b-βg-mCherry (red) and Dlx2 (green) expression on D13. (F) DlxI12b-βg-mCherry (red) and Foxg1 (green) expression on D11. G, DlxI12b-βg-mCherry (red) and Islet1 (green) expression on D13. H, DlxI12b-βg-mCherry (red) and Olig2 (green) expression on day 12. I, Most of the DlxI12b-βg-mCherry (red)⁺ cells also express Calbindin (green). Scale bar, 100 μm. White arrows indicates markers co-labeling.

[0047] FIG. 16. Enhancer 692-βg-mCherry was active in 70% of Lhx6 GFP⁺ cells. A-D″, mCherry expression (red) driven by 692-βg and Lhx6-GFP (green) expression in panels A-A″ (D9 aggregates), B-B″ (D11), C-C″ (D13), and D-D″ (D15). On D13 and D15, about 70% of the 692-mCherry⁺ cells were labeled with Lhx6-GFP (white arrows). E, 692-βg-mCherry (red) and Nkx2-1 (green) expression on D15. F, 692-βg-mCherry (red)⁺ cells are postmitotic, as they don't express Mki67 (green) on D15 (and other earlier time points). G, E14 cells line carrying 692-mCherry was examined with Sox6 expression. All of the 692-mCherry (red)⁺ cells express Sox6 (green). White arrows indicate markers co-labeling. Scale bar, 100 μm.

[0048] FIG. 17. Characterization of 1056-βg-mCherry in J14 ES cells differentiated toward an MGE-like identity with immunofluorescent staining. Enhancer 1056-βg-mCherry⁺ cells are Olig2⁺ and don't express markers of MGE-derived neurons. A-E″, mCherry expression (red) driven by the 1056-βg and Olig2 (green) expression are shown in panels A-A″ (D9 aggregates), B-B″ (D11), C-C″ (D13), D-D″ (D15) and E-E″ (D17). At all the time point examined, almost all of the 1056-βg-mCherry⁺ cells express Olig2 (white arrows). Only a few 1056-βg-mCherry⁺ cells are Olig2⁻ (white arrowheads). F, 1056-βg-mCherry (red) and Lhx6-GFP (green) expression on D11. G, 1056-βg-mCherry (red) and Nkx2-1 (green) expression on D11. Some of the Nkx2-1⁺ cells are also 1056-βg-mCherry⁺. H, A few 1056-βg-mCherry (red)⁺ cells are still mitotically active, as indicated by Mki67⁺ (green) staining on D11. I, 1056-βg-mCherry (red) and Calbindin (green) expression on D11. J, 1056-βg-mCherry (red) and Islet1 (green) expression on D11. White arrows indicates co-labeling of respective markers shown. Scale bar for all panels, 100 μm.

[0049] FIG. 18. Enhancer 1538-βg-mCherry⁺ labeled 40% of Lhx6-GFP⁺ cells. A-D″, mCherry expression (red) driven by 1538-βg and Lhx6-GFP (green) expression in panels A-A″ (D10 aggregates), B-B″ (D12), C-C″ (D14), and D-D″ (D16). On D14, 40% of Lhx6-GFP⁺ cells are 1538-mCherry⁺ and more than 90% of the 1538-βg-mCherry⁺ cells were also labeled with Lhx6-GFP (white arrows). E, 1538-βg-mCherry (red) and Nkx2-1 (green) expression on D14. F, 1538-βg-mCherry (red)⁺ cells are postmitotic, as they do not express Mki67 (green) on D14 (and other earlier time points). Scale bar, 100 μm.

[0050] FIG. 19. All of the DlxI12b-βg-mCherry⁺ cells express Lhx6-GFP thirty-three days after transplantation into the neocortex (white arrows in A-A″). About 28% of Lhx6-GFP⁺ cells are also DlxI12b-mCherry⁺. One of the double positive cells (DlxI12b-βg-mCherry⁺, Lhx6-GFP⁺) is shown in B-B″. Scale bar for A-A″: 200 μm; for B-B″: 50 μm.

[0051] FIG. 20. Genome-wide Experimental Comparison of Enhancers Active during Human and Mouse Cortex Development(A) ChIP-seq analysis was performed on human gestational week 20 and mouse postnatal day 0 cortex tissue using an antibody directed against the enhancer-associated p300/CBP proteins. (B) Two representative peaks (candidate enhancers) identified from the human fetal data set. (C) Predicted human fetal cortex enhancers are significantly enriched in the larger vicinity (up to 220 kb away) of genes highly expressed in the human fetal cortex. Error bars represent the 90% confidence interval on the basis of 1,000 iterations of randomized distribution (see experimental procedures in the Examples below). (D) The majority of candidate enhancers identified from human fetal cortex show evidence of p300/CBP binding at orthologous sites in the mouse genome (top two sectors of heat map). However, a substantial proportion of human peaks either shows no evidence of p300/CBP binding at orthologous sites in the mouse genome (third sector) or falls into regions of the human genome that have no known orthologous sequence in the mouse (fourth sector). (E) A substantially larger proportion of mouse P0 cortex candidate enhancers was found to be bound by p300/CBP at orthologous sites in the human genome. (F-K) Transgenic activity analysis of two candidate enhancers (B) in transgenic mice at postnatal day 1. Each pattern was reproducible in a minimum of three F₀ animals; three sectioning planes from one representative brain per enhancer are shown. Red arrows indicate expression in the cortex.

[0052] FIG. 21. Using Telencephalon Enhancers as Tissue-Specific Reagents(A) Approach used for the generation of the large-scale high-resolution atlas at e11.5. (B) Enhancers can be used as drivers of other reporter and effector genes, such as GFP or tamoxifen-inducible Cre recombinase. GFP reporter expression at e11.5 recapitulates the annotated LacZ expression pattern (orange arrowheads). Schematic components of constructs in (A) and (B) are not shown to scale. (C) Stable transgenic lines facilitate temporal profiling of enhancer activity and comparisons with corresponding gene expression patterns. (D) Tamoxifen induction at e10.5, followed by LacZ staining at a later time point (shown: e12.5) can be used for developmental fate mapping of neuronal cell populations.

[0053] Table 1 shows the SEQ ID NO., the enhancer element human sequence (hs) ID, and the chromosome location and coordinates, and the location start, end and length for each of the 145 enhancers, SEQ ID NOS:1-145.

[0054] Table 2A shows the identified human and mouse forebrain subregions where the enhancers SEQ ID NOS:1-145 are shown to have activity and drive expression. Sequence coordinates and neuroanatomical activity annotations of 145 enhancers analyzed at histological resolution. See FIG. 6 for abbreviations and boundaries of telencephalon subregions. Table 2B provides further comments for each of the subregions where the enhancers are shown to have activity.

[0055] Table 3. Genomic intervals near 79 genes with known roles in forebrain development, screened for enhancers in the present study.

[0056] Table 4. Genomic coordinates of 231 candidate enhancer sequences near genes with known roles in forebrain development (see Table 3) identified by extreme human-mouse-rat conservation (17) and/or extreme constraint in vertebrates (20) that were tested in vivo in the present study.

[0057] Table 5. Overview of all 329 sequences tested for enhancer activity in transgenic mice at e11.5 in the present study.

[0058] Table 6. Gene expression patterns of 113 transcription factors in the embryonic forebrain. See FIG. 6 for abbreviations and boundaries of telencephalon subregions.

[0059] Table 7. Top enriched annotations of putative target genes near 4,430 ChIP-seq predicted forebrain enhancers.

[0060] Table 8. Top 100 motifs associated with each of the three main classes of enhancers.

[0061] Table 9. Confusion matrix for the RF classifier. The matrix shows how many enhancers active in pallium only, pallium and subpallium, and subpallium, as well as randomly selected (genomic background) sequences (rows) are classified in one of these possible four classes (columns). The numbers denote total numbers of classified sequences

[0062] Table 10. Select marker genes expression from differentiated ES cells (ES Lhx6-GFP⁺ and ES Lhx6-GFP⁻) and E12.5 MGE cells (MGE Lhx6-GFP⁺) and the comparisons (fold change) of ES Lhx6-GFP⁺ vs. ES Lhx6-GFP⁻, MGE Lhx6-GFP⁺ vs. ES Lhx6-GFP⁻, and MGE Lhx6-GFP⁺ vs. ES Lhx6-GFP⁺. Column 1 lists marker genes for specific cell types and regions. Note that many of these are not specific for those cells states, but are recognized as useful markers. The expression levels in the columns 2-4 represent the averaged normalized log 2 intensity for each gene. The numbers in columns 5-7 (the fold change) are ratios of the average signal intensity (unlogged) of the two groups in comparison. Light gray highlighted genes are enriched in ES Lhx6-GFP⁻ cells whereas dark gray highlighted genes are enriched in both MGE Lhx6-GFP⁺ and ES Lhx6-GFP⁺ cells. For most of the genes, the expression in the ES Lhx6-GFP⁺ cells and MGE Lhx6-GFP⁺ cells show similar expression trends, in comparison to ES Lhx6-GFP⁻ cells. However, there are a few genes (shown in black) that do not follow this trend.

[0063] Table 11. Enhancer activities at different time points after differentiation. Percentage of mCherry⁺ (mCh), GFP (GFP) and mCherry⁺/GFP⁺ (mCh/GFP) cells from each enhancer carrying clones at D9, D11, D13, and D16 of differentiation. DlxI12b: J14 with DlxI12b-βg-mCherry; 692: J14 with 692-mCherry; 1056: J14 with 1056-βg-mCherry; 1538: J14 with 1538-βg-mCherry.

### DETAILED DESCRIPTION OF THE EMBODIMENTS

[0064] MGE-derived interneuron progenitors have tremendous potential for regenerative medicine (Baraban et al., 2009; Sebe and Baraban, 2011; Tanaka et al., 2011). Towards this end, we explored two approaches using mouse cells to generate and purify these MGE interneuron progenitors: 1) culturing dissociated primary MGE cells; and 2) introducing “MGE-specific” enhancer-reporter constructs into mouse ES cells, and using a modification of published methods to generate MGE-type cells.

[0065] In one embodiment, compositions and methods are described to generate specific types of neural cells from stem cells or reprogrammed cells. In some embodiments, the approach is general, and should be applicable to any type of brain cells. It involves the use of a novel set of gene regulatory elements that we have recently identified that are specifically expressed in progenitors of specific brain cells. We explored new approaches to identify and select for specific interneuron precursors generated from human ES, iPS and iN cells. These approaches will take advantage of recent discoveries about the distinct origins, lineages and molecular properties of different interneuron subtypes and will use a novel set of human enhancers expressed in the MGE. Furthermore, these studies will elucidate basic information on the molecular steps for making various types of neurons generated by the human MGE.

[0066] In one embodiment, a method for generating neurons active in various structures/cell types as follows: (a) computational identification of a candidate enhancer sequence; (b) transgenic testing in mice, including photography of whole embryos and generic descriptions of patterns such as “active in forebrain”; (c) sectioning of such transgenic embryos and photography of serial sets of sections; (d) neuroanatomical annotation (interpretation) of these sets of sections to describe embryonic enhancer activity patterns; (e) through the further interpretation of these descriptions of embryonic enhancer activity patterns, define which enhancers are likely to be active in a certain cell type and can thus be used as a method for neuronal differentiation or reprogramming protocols. In one embodiment, the method was used to identify enhancer sequences SEQ ID NOS:1-145.

[0067] In one embodiment, compositions and methods are used for the generation of a specific type of cells derived from the embryonic forebrain—cortical and hippocampal GABAergic (inhibitory) interneurons. Cortical and hippocampal GABAergic (inhibitory) interneurons have fundamental roles in controlling cortical excitatory/inhibitory balance and thereby regulate cognitive processes and prevent hyper-excitability states, such as epilepsy. In addition, there is strong evidence for interneuron defects in other disorders, such as schizophrenia (Gonzalez-Burgos and Lewis, 2008), and suggestive evidence in autism (Rubenstein and Merzenich, 2003). There are several reasons why it is important to generate these interneurons in vitro from stem cells. First, using iPS or iN cell technology, one could generate these cells from patients with various forms of epilepsy, schizophrenia and autism, and determine whether abnormal interneuron function could contribute to these disorders because of cellular and/or electrophysiological defects. Second, roughly 30% of epileptic patients continue to have disabling seizures despite maximum pharmacotherapy; many require surgical resection of the epileptic focus, and therefore could benefit from a cell-based therapy.

[0068] The use of the human enhancers SEQ ID NOS: 1-145 provides key insights into the transcriptional mechanisms that regulate interneuron specification and differentiation. We used novel human enhancers that were found to drive expression in progenitor domains that generate interneurons, and antibodies that recognize endogenous human cell surface markers, as selection agents to identify and purify interneuron precursors. We identified specific human enhancers and have shown in the attached Tables that the enhancers drive expression to particular regions of the human forebrain. The specific human enhancers are identified as SEQ ID NOS: 1-145. Certain enhancers have not yet been described elsewhere including SEQ ID NOS: 83, 84, 99-104, 106-108, 110-118, 120-128, and 144-145.

[0069] Thus, in one embodiment, herein are described novel and specific human enhancers which drive expression and/or differentiation of specific forebrain cell types. Referring now to FIG. 2, the forebrain enhancers SEQ ID NOS: 1-145 are shown to have activity in different subregions of the developing mouse pallium (cortex) and thus in some embodiments, the enhancers may be used to drive expression in the identified region where the enhancer is shown to have activity in Table 2. In the Examples, it was shown that the enhancers reproducibly label subregions of the developing pallium and drive expression in these subregions as provided in Table 2. Full serial sets of sections for some of the enhancers can be viewed at the enhancer.lbl.gov website, using the enhancer IDs indicated in the Figure and Table panels. Referring now to Table 2, each subregion of the forebrain is identified by an X where the enhancer was shown to demonstrate activity and drive expression. The majority of subpallial enhancers drove expression in the subventricular zone and the marginal zone, but we also observed enhancers that were active in the ventricular zone (e.g., panel d, hs1056 (SEQ ID NO.:120)). Throughout and as in Table 2 and FIG. 2, the following abbreviations are used: MP, medial pallium; DP, dorsal pallium; LP, lateral pallium; VP, ventral pallium; LGE, lateral ganglionic eminence; Se, septum; Th, thalamus; EMT, eminentia thalami; CP, choroid plexus; MGE, medial ganglionic eminence; and POA, preoptic area.

[0070] In some embodiments, the enhancers and their derivative structures may be used as a molecular reagent or reporter construct to drive expression in selectable regions as identified in Table 2. For example, in one embodiment, enhancer hs422 (SEQ ID NO:42) may be used to drive expression to the subregions LGE SV, LGE MZ, MGE VZ and MGE MZ. Hs422 (SEQ ID NO:42) which is flanked by genes DLX1 and DLX2, comprising the sequence of:

agggggtcttcctaggttcaatttcccctaggagatgtgactttgctagt
gcgaagatttctgtccggcatctgactcaggtcccccagacggcagctag
ggcccaatgcctcaagctacaggcaaaatctgtttggtcaagcggattgt
aatactttgagatattagcttatactaatttaataatctcttgctaacag
ttcaaatagagaaattattagttttagctcaacgaaaacggtctttagtt
aggctttattataattataagcggttgtactttttaaaaatgttaatctc
aatataggcctaattaatgctgccttgttactgacaagtagttcatcaaa
tatctgattcaaagattttcataatgagtatattaattaaactatgaata
atctaaaggtggttatatttaaacaatacctcattataatgattaaatac
tgatttcgaatattatgtcttaacaattgtcacttagaaaacacaacctt
tccttatgtatgagtctgtaatggcaaaatgcaattttgggatttttttc
ccttgttcaaaaaatgtgaaactcattttaaaacacttctgaaataggtt
acacacagcttaatgattatcaaaatgactcttttctgcaaaaaaagacc
ccaaagtgcgcgtacagctgcaaacccaagagggtcagcatcatttcact
gtattctcttcttgattacaagccgggcccatcaaacacaacataattac
agtaatttcaggtttatttattctaatgcagtttccccatctctctggta
attatgagcaattttttcgcccagggaatctttttgcattaacaaaagag
ataacgcactgaaagccaaatttgctgtgcattgagaaaaggaaaaaaaa
aaatcaaataggtgcgagctgccatctctgcaattctctggtaccggagc
cggcaaattgcttgcaggtgtatggagcaagcttgtcaatggccaggcct
ccaaattagcaaatgcacagcagcaaagtaatgaagacagacttagcaaa
attgccaaacaacagatatccctttaatatcttctctcacccacactagc
tctaaaaaggggtaggggtagggagagaagcaacagtccccagccccctc
ctcactggtcttggctttcaggag

[0071] Enhancer hs422 Primers are (+)AGGGGGTCTTCCTAGGTTCA (SEQ ID NO:146) and (+)CTCCTGAAAGCCAAGACCAG (SEQ ID NO:147).

[0072] In another embodiment, enhancer hs692 (SEQ ID NO:78) located at (hg19) chr11:15587042-15588314 and residing near the gene SOX6, may be used to drive expression to the subregions LGE MZ, MGE VZ, MGE SVZ, MGE MZ, POA VZ, POA SVZ, POA MZ, comprising the sequence of:

ACATCTCAGTGGCTCATAAGATTCTACTGACCAGAGCTCTGCAGAGCCCA
GGGTGCAGGCTGGGAAGGAGAAAGCAAAGGGGACCTCACAAGTCAGAGTC
ATTGGTTTCATTTCCCAATATCCAAATGCCTCTGTCCAATAAGACCTATA
ACCAATTTCCCAGAGAAGGCCCCCGAAGAGGCTGAGCTTGATGGAGTTGG
GTAGTGGGCTTTTTTTTTTTTTTTTTTTTTTGGCTTTTTTTTGGACTAAA
AGCAATTTCCATTTTATGCCTTTTGTCTCTTCATCCAAGCAAATGCCGGT
GGGATCTGGCAACCTGAGTTCAATAGCCAGTCCTTTTGGTCTTTCAAAGG
CTATGAATGTAATAAGAGCACTCAACCCTTCTGAAGATATGCAAATCCGT
GCATTTAAAAGATTTACATTCATCCTTCACAGGCCCTGAAATATAAATAT
GAAATACCCAGAACCTTGTCACTTCAGTAATAATTAAGCTGATGGCCTAT
TATGTTCGATTGCAAATCAATATAGTATCTTTTGGTGCCACTTGAGTTCT
TGAGGGTTGGCGCGGGGCCAGCTCCAGTTATACAATTGAATTGCTGCAGC
TGCCTGGGAAACTTCGCTGCCGTTCCCATTCAGGAAGAATAGGCGGGTAA
CAATGGTGACCAGCCTCCCTACAGTAATTGTGTACGAGGACACATTTCCA
ATGGGGTTTTTGTTCAGCAGGTGCTGTTATTTTAGTTTAATTTGAATTCT
GAAATATGGAGGAGAGAAGGAGACCAATCTTAACAGCATCTAACCTACAG
CTGTTCGAAAGAGGCCAGCAAACAGCATATGTTGCTTAGATGGAAATCAT
AATTGCTCATTCTCCCTGGGATGTTGGCCCACCAACGTGGAGCCTCTGAA
ATTAGCTGGCATTTTTCTGGCATTTTCCTCAGTGGTGAGGCCTCTGCAGA
GCTCAGGAGGAACTATTCTAGAGTGGCTCGCTCCCTGGGAGGCTTTGGTG
GTGGCGGCTGCTGCGTCTCCTTTTTCTTCTCCTTCCCTCTTTCTCCTTCA
TGGTAGGCTGAGGTGAATTCCAAACACTACACAAAACACATCCAGGGTTG
GCCTCCTCATTGGAGGCTGCCATGGGGCGCACAAGGAAACAGGCAGTGGC
GAGGTCTGGTGGAGCCCCAGGGCCAGACTCTCTCTGAGAGCAGCGACCAA
CACCCCTGGGTCAGGGTCAGGGCAAGAGGAAAACTCAGATAGTAAGGAGA
ATAGCATCAACACAGACACCCTG

[0073] In another embodiment, enhancer hs1056 (SEQ ID NO:120) is located at (hg19) chr18:76481723-76483257, near the gene SAL LIKE 3 (SALL3), may be used to drive expression to the MGE VA, MGE SVZ, POA VZ and POA SVZ subregions, comprising the sequence of:

TCCCTCACAGAACTCAGGACTAAACCGGGGGCTAGGAGGCCTCACATCTC
GGCCCACTCCGCGGCAGCCCCGCGCCAGCCAGGAAGACGTTATCCGTCCA
TCGCCGGAGACTGTTCGTGTATTAGCAATTCACTGTCAAACGCTCAAGAG
TTTGCCAAAGCATAATAGATGCTTTACATTTTATGCATAACTAGTTCTGA
GACCAGGGCTATAAAAGTTTTCTATTAACATGTAAGCACTAAGACAAGTT
TTTTTTCACTTGATAAATATACATAACTCCTTGACAATGAGGCCCTTGTG
TTGCTAATGGGGCCCTTAATGGAGAGTTATATTTCCAGGATTATATCTTT
ATTCAGTTGCAAATGATTTTTGGGGGGAGTTTTAATGCTCTGCTCCGTCT
ATGAATAATAGTATCGTTTGAATGCAGCGGACACCTGGTGCCGGAGGACA
GTGGGGCTCTGCAGTGACCTGGCGACGCTGCCAAGTTCGCATTTTCCCAG
CCTTTCCTACCCGCTCCATTCAGCATCTAATTTCATTCTCCCTCAGCAGA
ATGCTAGACACTTGTAACTTTATTCTCCCTCCGCAAAAACTTGCTCTCTT
GTAAGGAAAAAATCCTGGAAGAAAAAAATTTCTCTTATCAATCTCTTCTT
ATATAGAGTCTAGTAATTTGAAGGCTGGCTAAAGTTTCAGGAAAAACCTT
CCAATTAAATACTGTAAAAAGATAAAATAACAGTGGCCTTGCTGCTGCCC
AATAGCTTTATTGAAGCGCTCTTTTGTTGATTTATTGTACGTTAGCCACC
GAGCCGTGCAAAGAACATTACGTTTCAGAAAGAGCTATTCGTATGCGGCC
TGCATCCACTCCAAAAACAATCAGGCCTGTATTGCGTTTTGCAAATTTAT
ACCAGGATGTTGGTTTAGAGTGTTTCCCTGAAAAGTTTTTCAAGTAAGTG
TCTGCTTTCATGGGCGAGAGTGATTGAGGCACACAAACAAACCTTTGTTT
CAAAACTCACAGATGTATGGCCGGGCTGAGCTTTGTTTTCCCCTTTAAGA
AGTATTCTCAGATTTGTGTTTGGAGCACAACACAGGATTGTACAAAAAAA
AAAAAATCAGCTTGAGGATGAATGTCTCGTATAATCTGAGGCTTTTCCAG
ATTTTCCCAGGGTTAATTTTTCTACCCTGAACTTTGCGTGTTGGGTAGGT
TAGGGTTTTTTTTTTTTTCTTTAATTTATTTATTTGTTTGTTCGTTTGTT
TTTGTTTTTAAATTCAGGCATGCCATGAAAAAGAATCCTGCCTACTTCAG
CTTTGAATGTGGCTTCAGGAAACTTCATTTCAAAGCTATTAGGGAGTTTG
CAAGCTCCATAAATATACTTTTGTTCAAGTTGCAATCTGCCCTTCTCTCT
CGCGGGCGCCCGAGCATCGTGCTGGGACATCCGGCAGCCCCAGGCTGCGC
GACGTGGAGCCAAGAGGACAGCCACCTGGGTCGGGGCTGAAGGAAATCCT
AAGTGACAAAATATTTAGACTTCAAGGCAGGCATC

[0074] In another embodiment, enhancer hs1538 (SEQ ID NO:144) is located at (hg19) chr14 36911162 36914360, near the forebrain gene TITF1, and directly neighboring the genes DPPA3 and SFTA3, and may be used to drive expression to the POA VZ, POA SVZ, and POA MZ subregions, comprising the sequence of:

GCTGCCTCAAACAAGAATGAAACCATTTTTCTCAAACTGGTAGAAAAACC
TTATTTCAATTATTTTTTCTAGTCCTATACTTCCAGAGGATGGGAAACTG
TTCTTAAAAGTGCAATGGACTGACAGAAAGCAGATCCGCGGTTGCCTCCA
GGGCTGGGGGAGGGGATTGACTGCAAAGGGGCGCACGGGAATTTACTGGG
GTGACAGAAAGATTCCACATCACAATTAAGGTGGTGGTTACATGATTGTA
TACATTTGCCAAAATTTACTACATTTACAATTAAAATGAGTGGATTGTAT
TATACATTGCTCAATAAAACTATTTTTAAATAGCTTTAGTAATAAGTGAA
CTAGTGCTTTTTTTTTGGTGATCATTTGCAAGAATACTCCAAATTCAATA
AGAACCAGGATTCTCTTTTCAAAAGTCCAAAAACTAGTAACAAGTGCTGT
GTTAGATTTGAAGAGCTGGAAGGACTTTACATACTTAAATTCCATTTTAA
TCTAGTTGAAACTCCCATAGAAAGAAGAAAAAAATACATTTTTAAAGTAC
AGATTTTTATTCAATAATTCTTTAGTTCTTTTCTCTTTTAACTTCCCTGG
GGGGAGCAGGGAACTCTCATTCTGGTACCGATATTTGGATTAAAACAAAT
ATCCACCCATTCATTAAAAGTTTCTCTCATATAAAGGAATTCATTTTTTT
TCTTGATTGGTGCTAGACTCACAGACAGACAGAAATAAGCTGCCATTCTT
CCATTTGATAGCCAGACGCTGCCAGTTGTAGCCAGGGTAGTCATGCTGTT
AAATTAGGTCTAATGAAGGAGTAATTGCTTTAGATATAGTGAACCATTTC
AAAGAAAACAAGGATTCTAATTGATTTGCAATTTGTTTGGCACATTGCAT
TGTCTGCGGCTATTGATTAGTCTTCTGGATTTCACACTGCATGTGTTTCC
CTTTATTAAGGGAATAACAGGTTACTGATTACTTTCTTTCTGGGTTTAAT
GTAGCGGTTAATGTCTACTTTGTTCTTGTGTCATGTCACAGGCGAGGAAG
GAATAATAGGCAAGTGGGTGGCCCTTTGCTAAGCAACTTCCCTGCTGCTC
TGAGCTGTGTGCTCTGAGACAGGCTGAAAAGCAGATCAAGAGAAAGGGTT
AGAATAGCAGGACTCACAAGTTAAGGCCTGAGTCAGGCTAGACCCAGCTC
AAAACTTGGCTTTCCCCTCCCAGTCAAAGCATAGCATGGGACAAAGCAGC
TGGTGGTAGATTTGTTCTTGTATCATTCGATTATTTGTAGACAGGATATG
AATCTATGCCCATTGTTTTGCTTAATAGGTATGCATGCTAAATGGATGCA
GAAAAAGAATATTTGAGGGTGAGGTCTTTTGGTTCATTTAACCCTTTGGA
AAGTGACATTTTGTTGGCACCTGGGAAGCACTTGTTGCTGAGGTGTCGAT
ATGATCATCAAAATGGCTCTTATGTTTATACCAACTGCAGGGGAGGGAGA
AAAAGTTCTCAGGGTTGCAGTCATTTCATTGCCCTCAAAGCACAGCAGGA
ATTATTAGCTTACCCTGGCGTGCCCCTTTGTTTTCCTAGGGCTTTGCTCC
TCCAGCAGATACTCATTTAAGGCGAATCCACTGCTTTCTGAAATGTGTTT
TGCAATGGTGCACAGAACAGGCACTCACTTAGCGGATCTAATCCTTTCAT
GGCTCAGCTTGTTAATGTAGCAAACTGCTGAAAATGGGAAATGGATTCTT
TAATGAGAACAGTCCCTTCATGGCTTTATTCTCCCAGTCCAACCCCCAGG
CATTCATTCAAGTCCCCCCACGCCCGACCTCCCACGCCAGGATCAGGCAC
CCCCACTTCCCACCCAGCAAGCAGCCCATTTTCCAGCACGAAGTCCCCCA
TCTCTAGGCCCCTTGCTTCCCCACGACCTTCCCAGAGCCCTTGGAAGCTC
ACAAATAACAAAGGGGTGTAGGCAGTAAAAGATTCCCTTTCTCTGCTTCA
GTTACCTCCTTCCTAAGCCTGAGCCCGTCTTTTCCTGTGCTTCAAATCTG
ACATGGTTATAGAGTGGAGCCTTTTCCTGATAAATTGCAAAGTAGCTAAC
ACCCAGGGATTACATCTAAATTTATCAAATAAACACACTTTTGATATAAA
CATACTACCCAAGGTATTATAGATTTAATATCTTTCTTTAACATAGCTTT
TGTACTATACAGGTTGAATATCCTTGGGACTAGACATGTTTTGGATATTT
TTGGATTTTGGACTATTTGCATATACATAATGAGGTCTCTTGGGATGAGA
CTCAGGTCTCAACATTAAATTTATTTACGTTTCATATACACCTTATAGAC
ATAGCCTGAAGGTAATTTTAGACAATACGATACTAATTTTGTGCATAGAA
CAATGTTTGTGTTAAGTGCTATTAAGACTTTTTTTAAAGTGTTAAGACTT
TTCCACTGTGGCGTCATGTGAGTACTCAAAAAGTTTTAAATTTTGGAGCA
TTTTGGGTTTTGGATTTTCAGATTAAGGATGCTCAACCTGAATTGGATTT
TATAATGATGCTGATTGCCAAGGGTTTCAAAATGGAGCCAATCAGTGAAA
GTTAACTTGGACTCTGGTCTTTATTATTTTTCTTTTACGATTTTTACTCC
TGTGGGTCTTCCTGAAGCTTTGGTACTTCTCTAGAAATCCACTCCAAAGA
AAAAAAATCAGGCCTGGCACAGTGGTTCACATCTGTAATTCCAGCACTTT
GGGAGGCCAAGGTGAGAGGATCACCTGAGGTCAGGAGTTCAAAACCAGCC
TGGCCAACATGGCAAAATCCCATCTCTACTAAAAATACAAAAATTAGCTG
GGCGTAGTGGTGCACACCTGTAATCCGAGCTTACCCGAGAGGCTGAGGCA
GGAGAATCACTTGAACCCGGGAGGTGAAGGTTGCATTGAGCCGACCGAGA
TCGCCCCACTGCACTCCAGCCTGGGCGACAGAGGGAGACTGTCTCAAAAA
AAAAAAAAAAAAAAAGTACTCGAAGCAGGTAAAGTTTAGGTTAAGAAGAT
ATTCAAGATTACTTGGAAGTCATGACAGGGCAGCCTGGAGTTTGAAGTGT
ACATTTAAAAGAGAAAATGAGGATAGTTATGCCCATTTTGCCTTAGAGAT
AGGAAAGTAAATTATGTGTACATGAGCCCAGGTCTTTCCCTCATCCAA

[0075] In one embodiment, the presently described neural enhancer sequences described in SEQ ID NOS: 1 to 145, in conjunction with Table 2, are contemplated for use in any of the applications herein described. In some embodiments, an isolated nucleic acid molecule encoding a human enhancer (SEQ ID NOS:1-145), wherein said nucleotide sequence is optimized for activity in the host organism.

[0076] In another embodiment, the nucleic acid molecule comprising a human enhancer sequence that promotes the identification, isolation and/or differentiation of human interneurons or ES-derived cells. The human enhancer sequence may be selected from any of the enhancer sequences of SEQ ID NOS:1-145. Thus, in one embodiment, an expression cassette comprising a nucleic acid molecule comprising a human interneuron enhancer sequence selected from SEQ ID NOS:1-145.

[0077] The expression vector usable in the present methods with the enhancer nucleotide sequences of SEQ ID NOS:1-145 of the present invention include pUC vectors (for example pUC118, pUC119), pBR vectors (for example pBR322), pBI vectors (for example pBI112, pBI221), pGA vectors (pGA492, pGAH), pNC (manufactured by Nissan Chemical Industries, Ltd.). In addition, virus vectors can also used including but not limited to lentiviral, adenoviral, retroviral or sendai viral vectors. The terminator gene to be ligated may include a 35S terminator gene and Nos terminator gene.

[0078] The expression system usable in a method with the enhancer sequences of SEQ ID NOS:1-145 include any system utilizing RNA or DNA sequences. It can be used to transform transiently or stably in the selected host (bacteria, fungus, plant and animal cells). It includes any plasmid vectors, such as pUC, pBR, pBI, pGA, pNC derived vectors (for example pUC118, pBR322, pBI221 and pGAH). It also includes any viral DNA or RNA fragments derived from virus such as phage and retro-virus derived (TRBO, pEYK, LSNLsrc). Genes presented in the invention can be expressed by direct translation in case of RNA viral expression system, transcribed after in vivo recombination, downstream of promoter recognized by the host expression system (such as pLac, pVGB, pBAD, pPMA1, pGa14, pHXT7, pMet26, pCaMV-355, pCMV, pSV40, pEM-7, pNos, pUBQ10, pDET3, or pRBCS.) or downstream of a promoter present in the expression system (vector or linear DNA). Promoters can be from synthetic, viral, prokaryote and eukaryote origins.

[0079] The neural enhancer sequences can be first cloned from cDNA, genomic DNA libraries or isolated using amplification techniques with oligonucleotide primers or synthesized. For example, sequences of candidate genes are typically isolated from nucleic acid (genomic or cDNA) libraries by hybridizing with a nucleic acid probe, the sequence of which can be derived from publicly available genomic sequence or the primers provided herein as SEQ ID NOS: 146-. In another embodiment, RNA and genomic DNA can be isolated from any mammal including: primates such as humans, monkeys, and chimpanzees; rodents, including mice and rats. Methods for making and screening cDNA libraries and genomic DNA libraries are well known (see, e.g., Gubler & Hoffman, Gene 25:263-269 (1983); Sambrook et al., supra; Ausubel et al., supra; Benton & Davis, Science 196:180-182 (1977); and Grunstein et al., PNAS USA, 72:3961-3965 (1975)).

[0080] Nucleic acids encoding the present neural enhancer sequences of SEQ ID NOS:1-145 can also be isolated from expression libraries using antibodies as probes. Such polyclonal or monoclonal antibodies can be raised using, for example, the polypeptides comprising the sequences such as the neural enhancer sequence set forth in SEQ ID NO:1, and subsequences thereof, using methods known in the art (see, e.g., Harlow and Lane, Antibodies: A Laboratory Manual (1988)).

[0081] Substantially identical nucleic acids encoding sequences of the candidate genes can be isolated using nucleic acid probes and oligonucleotides under stringent hybridization conditions, by screening libraries.

[0082] Alternatively, expression libraries can be used to clone these sequences, by detecting expressed homologues immunologically with antisera or purified antibodies made against the core domain of nucleic acids encoding sequences of the candidate genes which also recognize and selectively bind to the homologue.

[0083] In some embodiments, a vector comprising a promoter operably linked to a heterologous enhancer nucleotide sequence of the invention, i.e., any nucleotide sequence in SEQ ID NOS:1-145, that is a neural enhancer or DNA regulatory element are further provided. In another embodiment, the expression cassette comprising the vector containing an enhancer sequence selected from SEQ ID NOS:1-145.

[0084] The expression cassettes of the invention find use in generating transgenic embryonic stem cells. The expression cassette may include 5′ and 3′ regulatory sequences operably linked to an enhancer nucleotide sequence of the invention. “Operably linked” is intended to mean a functional linkage between two or more elements. For example, an operable linkage between a polynucleotide of interest and a regulatory sequence (i.e., a promoter) is functionally linked that allows for expression of the polynucleotide of interest. Operably linked elements may be contiguous or non-contiguous. When used to refer to the joining of two protein coding regions, by operably linked is intended that the coding regions are in the same reading frame. The cassette may additionally contain at least one additional gene to be co-transfected into the organism. Alternatively, the additional gene(s) can be provided on multiple expression cassettes. Such an expression cassette is provided with a plurality of restriction sites and/or recombination sites for insertion of the neural enhancer sequence. The expression cassette may additionally contain selectable marker genes or a reporter gene to be under the transcriptional regulation of the regulatory regions.

[0085] The expression cassette will include in the 5′-3′ direction of transcription, a transcriptional initiation region (i.e., a promoter), translational initiation region, a polynucleotide of the invention, a translational termination region and, optionally, a transcriptional termination region functional in the host organism. The regulatory regions (i.e., promoters, transcriptional regulatory regions, and translational termination regions) and/or the polynucleotide of the invention may be native/analogous to the host cell or to each other. Alternatively, the regulatory regions and/or the polynucleotide of the invention may be heterologous to the host cell or to each other. As used herein, “heterologous” in reference to a sequence is a sequence that originates from a foreign species, or, if from the same species, is substantially modified from its native form in composition and/or genomic locus by deliberate human intervention. For example, a promoter operably linked to a heterologous polynucleotide is from a species different from the species from which the polynucleotide was derived, or, if from the same/analogous species, one or both are substantially modified from their original form and/or genomic locus, or the promoter is not the native promoter for the operably linked polynucleotide.

[0086] Where appropriate, the polynucleotides may be optimized for increased expression in the transformed organism. For example, the polynucleotides can be synthesized using preferred codons for improved expression.

[0087] Additional sequence modifications are known to enhance gene expression in a cellular host. These include elimination of sequences encoding spurious polyadenylation signals, exon-intron splice site signals, transposon-like repeats, and other such well-characterized sequences that may be deleterious to gene expression. The G-C content of the sequence may be adjusted to levels average for a given cellular host, as calculated by reference to known genes expressed in the host cell. When possible, the sequence is modified to avoid predicted hairpin secondary mRNA structures.

[0088] The expression cassette can also comprise a selectable marker gene for the selection of transformed or differentiated cells. Selectable marker genes are utilized for the selection of transformed or differentiated cells or tissues. Marker genes include genes encoding antibiotic resistance, such as those encoding neomycin phosphotransferase II (NEO) and hygromycin phosphotransferase (HPT). Additional selectable markers include phenotypic markers such as β-galactosidase and fluorescent proteins such as green fluorescent protein (GFP) (Su et al. (2004) Biotechnol Bioeng 85:610-9 and Fetter et al. (2004) Plant Cell 16:215-28), cyan florescent protein (CYP) (Bolte et al. (2004) J. Cell Science 117:943-54 and Kato et al. (2002) Plant Physiol 129:913-42), and yellow florescent protein (PhiYFP™ from Evrogen, see, Bolte et al. (2004) J. Cell Science 117:943-54), and m-Cherry (Shaner et al., Nature Biotechnology 22: 1567-72). The above list of selectable marker genes is not meant to be limiting. Any selectable marker gene can be used in the present invention.

[0089] To drive increased levels expression of a cloned gene or nucleic acid sequence in a specific subregion, one can subclone the gene or nucleic acid sequence along with an appropriate enhancer sequence selected from SEQ ID NOS: 1-145 into an expression vector that is subsequently transfected into a suitable host cell. The enhancer sequence is selected based upon the subregion where it has been identified as driving expression and shown in Table 2. In some embodiments, the expression vector also contains other (strong) promoters or an additional enhancer from SEQ ID NOS: 1-145 to direct transcription, a transcription/translation terminator, and for a nucleic acid encoding a protein, a ribosome binding site for translational initiation. The enhancer and promoter are operably linked to the nucleic acid sequence. Suitable bacterial promoters are well known in the art and described, e.g., in Sambrook et al. and Ausubel et al. The elements that are typically included in expression vectors also include a replicon that functions in a suitable host cell such as E. coli, a gene encoding antibiotic resistance to permit selection of bacteria that harbor recombinant plasmids, and unique restriction sites in nonessential regions of the plasmid to allow insertion of eukaryotic sequences. The particular antibiotic resistance gene chosen is not critical, any of the many resistance genes known in the art are suitable.

[0090] In one embodiment, an expression cassette comprising the nucleotide sequence operably linked to a promoter that drives expression of a selective agent, signal peptide or label in the host organism, and the expression cassette further comprising an operably linked polynucleotide encoding a selective agent, signal peptide or reporter.

[0091] In one embodiment, a neural enhancer nucleotide sequence selected from SEQ ID NOS: 1-145 and a gene encoding a selective agent, signal peptide or label are cloned into an appropriate plasmid under an inducible promoter. This plasmid can then be used to transform human stem cells or progenitor cells to become a differentiated neuronal cell. In one embodiment, this system may maintain the expression of the inserted gene silent unless an inducer molecule (e.g., IPTG) is added to the medium.

[0092] In another embodiment, a cell comprising in its genome at least one transiently incorporated expression cassette, said expression cassette comprising a heterologous enhancer nucleotide sequence, operably linked to a promoter that can drive expression in the cell.

[0093] In another embodiment, a cell comprising in its genome at least one stably incorporated expression cassette, said expression cassette comprising a heterologous enhancer nucleotide sequence, operably linked to a promoter that can drive expression in the cell.

[0094] When referring to a cell, it is meant to include any number of cell types including but not limited to stem cells, progenitor cells, and in specific embodiments, neural progenitor cells such as MGE cells, or non-pluripotent cells such as fibroblasts which may be induced to become pluripotent or reprogrammed to a desired cell type.

[0095] In another embodiment, a method for enhancing embryonic stem cell differentiation in a cell, said method comprising introducing into a cell at least one expression cassette, said expression cassette comprising a neural enhancer nucleotide sequence selected from SEQ ID NO:1 to 145, operably linked to a promoter that drives expression in the cell. In one embodiment, an expression cassette comprising a neural enhancer nucleotide sequence and operably linked to a promoter that drives expression in progenitor cells. In another embodiment, transformed embryonic stem cells comprising at least one expression cassette.

[0096] In another embodiment, the progenitor cells are allowed to grow and differentiate and the enhancer activates or initiates expression of a marker or a reporter (e.g., green fluorescent protein, mCherry, etc.) after induction of cell differentiation. Thus the marker expression signals that the precursor cells have differentiated and have reached the proper cell state.

[0097] In another embodiment, an expression vector comprising a nucleic acid sequence for a cluster of neural enhancer sequences, selected from any of the polynucleotide sequences in SEQ ID NOS:1-145, which drive expression in a specific subregion. In some embodiments, expression in an organism is augmented by addition of an inducible molecule.

[0098] In some embodiments, it will be beneficial to provide more than one copy of the enhancer nucleotide sequence to the progenitor cell to induce differentiation.

[0099] In one embodiment, an induced pluripotent stem cell, such as those from a human patient, is transformed and undergoes cell differentiation by the enhancer nucleotide sequence of the present invention. Such differentiation can be confirmed by the expression of a selective agent, marker or label which is controlled by a suitable promoter capable of functioning in the stem cell, or with the enhancer nucleotide sequence of the present invention integrated in a suitable vector. The transformed and differentiated stem cell of the present invention, now a differentiated progenitor cell, can then be purified and used to generate specific cell and tissue types according to the present invention.

[0100] In another embodiment, a method for enriching and isolating differentiated stem cells, said method comprising introducing into a stem cell at least one expression cassette, said expression cassette comprising a neural enhancer nucleotide sequence and operably linked to a promoter that drives expression in the stem cell. In one embodiment, an expression cassette comprising a neural enhancer nucleotide sequence operably linked to a promoter that drives expression when cells have differentiated and reach proper cell state. In another embodiment, transformed cells comprising at least two copies of the expression cassette.

[0101] The expression vector usable in the present methods with the enhancer nucleotide sequence of the present invention include pUC vectors (for example pUC118, pUC119), pBR vectors (for example pBR322), pBI vectors (for example pBI112, pBI221), pGA vectors (pGA492, pGAH), pNC (manufactured by Nissan Chemical Industries, Ltd.). In addition, virus vectors can also used including but not limited to lentiviral, adenoviral, retroviral or sendai viral vectors. The terminator gene to be ligated may include a 35S terminator gene and Nos terminator gene.

[0102] The expression system usable in a method with the enhancer sequences of SEQ ID NOS:1-145 include any system utilizing RNA or DNA sequences. It can be used to transform transiently or stably in the selected host (bacteria, fungus, plant and animal cells). It includes any plasmid vectors, such as pUC, pBR, pBI, pGA, pNC derived vectors (for example pUC118, pBR322, pBI221 and pGAH). It also includes any viral DNA or RNA fragments derived from virus such as phage and retro-virus derived (TRBO, pEYK, LSNLsrc). Genes presented in the invention can be expressed by direct translation in case of RNA viral expression system, transcribed after in vivo recombination, downstream of promoter recognized by the host expression system (such as pLac, pVGB, pBAD, pPMA1, pGa14, pHXT7, pMet26, pCaMV-355, pCMV, pSV40, pEM-7, pNos, pUBQ10, pDET3, or pRBCS.) or downstream of a promoter present in the expression system (vector or linear DNA). Promoters can be from synthetic, viral, prokaryote and eukaryote origins.

[0103] The neural enhancer sequences can be first cloned from cDNA, genomic DNA libraries or isolated using amplification techniques with oligonucleotide primers or synthesized. For example, sequences of candidate genes are typically isolated from nucleic acid (genomic or cDNA) libraries by hybridizing with a nucleic acid probe, the sequence of which can be derived from publicly available genomic sequence or the primers provided herein as SEQ ID NOS: 146-. In another embodiment, RNA and genomic DNA can be isolated from any mammal including: primates such as humans, monkeys, and chimpanzees; rodents, including mice and rats. Methods for making and screening cDNA libraries and genomic DNA libraries are well known (see, e.g., Gubler & Hoffman, Gene 25:263-269 (1983); Sambrook et al., supra; Ausubel et al., supra; Benton & Davis, Science 196:180-182 (1977); and Grunstein et al., PNAS USA, 72:3961-3965 (1975)).

[0104] Nucleic acids encoding the present neural enhancer sequences can also be isolated from expression libraries using antibodies as probes. Such polyclonal or monoclonal antibodies can be raised using, for example, the polypeptides comprising the sequences such as the neural enhancer sequence set forth in SEQ ID NO:1, and subsequences thereof, using methods known in the art (see, e.g., Harlow and Lane, Antibodies: A Laboratory Manual (1988)).

[0105] Substantially identical nucleic acids encoding sequences of the candidate genes can be isolated using nucleic acid probes and oligonucleotides under stringent hybridization conditions, by screening libraries.

[0106] Alternatively, expression libraries can be used to clone these sequences, by detecting expressed homologues immunologically with antisera or purified antibodies made against the core domain of nucleic acids encoding sequences of the candidate genes which also recognize and selectively bind to the homologue.

[0107] To drive increased levels expression of a cloned gene or nucleic acid sequence in a specific subregion, one can subclone the gene or nucleic acid sequence along with an appropriate enhancer sequence selected from SEQ ID NOS: 1-145 into an expression vector that is subsequently transfected into a suitable host cell. The enhancer sequence is selected based upon the subregion where it has been identified as driving expression and shown in Table 2. In some embodiments, the expression vector also contains other (strong) promoters or an additional enhancer from SEQ ID NOS: 1-145 to direct transcription, a transcription/translation terminator, and for a nucleic acid encoding a protein, a ribosome binding site for translational initiation. The enhancer and promoter are operably linked to the nucleic acid sequence. Suitable bacterial promoters are well known in the art and described, e.g., in Sambrook et al. and Ausubel et al. The elements that are typically included in expression vectors also include a replicon that functions in a suitable host cell such as E. coli, a gene encoding antibiotic resistance to permit selection of bacteria that harbor recombinant plasmids, and unique restriction sites in nonessential regions of the plasmid to allow insertion of eukaryotic sequences. The particular antibiotic resistance gene chosen is not critical, any of the many resistance genes known in the art are suitable.

[0108] To increase the expression levels of a gene of interest in a specific subregion, one can subclone an appropriate enhancer sequence selected from SEQ ID NOS: 1-145 into a vector that contains the gene of interest. The vector is subsequently transfected into a suitable host cell in an organism. Based upon the subregion where it has been identified as driving expression (as shown in Table 2), the enhancer sequence is selected to direct expression of the gene of interest in the specific subregion of the forebrain of the organism. Genes of interest can be genes for example such as, GDNF glial derived growth factor to increase expression in the striatum to prevent cell death as in Parkinson's death.

[0109] The particular expression vector used to transport the genetic information into the cell is not particularly critical. Any of the conventional vectors used for expression in eukaryotic or prokaryotic cells may be used. Standard bacterial expression vectors include plasmids such as pBR322 based plasmids, pSKF, pET23D, and fusion expression systems such as GST and LacZ. Epitope tags can also be added to the recombinant neural enhancer sequences to provide convenient methods of isolation, e.g., His tags. In some case, enzymatic cleavage sequences (e.g., Met-(His)g-Ile-Glu-GLy-Arg which form the Factor Xa cleavage site) are added to the recombinant 14-3-3sigma inhibitor peptides. Bacterial expression systems for expressing the selectable markers or reporter genes are available in, e.g., E. coli, Bacillus sp., and Salmonella (Palva et al., Gene 22:229-235 (1983); Mosbach et al., Nature 302:543-545 (1983). Kits for such expression systems are commercially available. Eukaryotic expression systems for mammalian cells, yeast, and insect cells are well known in the art and are also commercially available.

[0110] Standard transfection methods can be used to promote differentiation of stem cells into neural progenitor cells, which can then purified using standard techniques (see, e.g., Colley et al., J. Biol. Chem. 264:17619-17622 (1989); Guide to Protein Purification, in Methods in Enzymology, vol. 182 (Deutscher, ed., 1990)). Transformation of cells is performed according to standard techniques (see, e.g., Morrison, J. Bact. 132:349-351 (1977); Clark-Curtiss & Curtiss, Methods in Enzymology 101:347-362 (Wu et al., eds, 1983). For example, any of the well known procedures for introducing foreign nucleotide sequences into host cells may be used. These include the use of calcium phosphate transfection, lipofectamine, polybrene, protoplast fusion, electroporation, liposomes, microinjection, plasma vectors, viral vectors and any of the other well known methods for introducing cloned genomic DNA, cDNA, synthetic DNA or other foreign genetic material into a host cell (see, e.g., Sambrook et al., supra). It is only necessary that the particular genetic engineering procedure used be capable of successfully introducing at least one enhancer nucleotide sequence into the stem cell capable of differentiating into a neural progenitor cell.

[0111] After the expression vector is introduced into the cells, the transfected cells are cultured under conditions favoring differentiation of stem cells into neural progenitor cells. Examples of conditions and methods for inducing cell differentiation are described in Reubinoff et al. U.S. Pat. No. 7,947,498, Embryonic stem cells and neural progenitor cells derived therefrom, Reubinoff et al. U.S. Pat. No. 7,604,992, Generation of neural stem cells from undifferentiated human embryonic stem cells, and Slukvin, I et al., US Patent Publication No. 20110117135, Method of Forming Dendritic Cells from Embryonic Stem Cells, all of which are hereby incorporated by reference in their entireties.

[0112] In another embodiment, a method for generating cell types using the enhancers SEQ ID NOS: 1-145 further comprising using growth factor inhibitors to generate cortical interneuron progenitors from ES cells. For example, in Eiraku et al., Cell Stem Cell 2008, 3:519-532; Danjo et al. J Neurosci 2011 31:1919-1933, hereby incorporated by reference, mouse ES cells were dissociated and 5000 cells/well were plated in 96-well lipidure-coated plates to facilitate embryoid body formation. Addition of two growth factor inhibitors, the anti-Wnt reagent Dickkopf-1 (Dkk1) and the anti-Nodal reagent Lefty-A (or SB431542), during the early time points of differentiation efficiently produced Foxg1⁺ telencephalic neural stem cells. To convert neural stem cells into ventral telencephalic cells (MGE/LGE/POA-type neuron progenitors), Shh (or SAG, a Shh agonist) was added on day 3 and day 6 after differentiation.

[0113] In another embodiment, mouse ES cells are dissociated and grown as embryoid body (EB) as described in Maroof et al., J Neurosci 2010, 30(13):4667-4675), hereby incorporated by reference. Cells that become floating EB are grown in a 1:1 mixture of KSR and N2 media supplemented with noggin (250 ng/ml). On differentiation day 5 (dd5), embryoid bodies (EBs) are mechanically dissociated using Accutase (Invitrogen) and plated onto polyornithine-, laminin-, and fibronectin-coated plates using high density droplets (˜10,000 cells/μl) in N2 medium with bFGF (10 ng/ml, day 5-8), IGF1 (20 ng/ml, day 5-8), and SHH (50 ng/ml, Shh-N-C25II, R&D Systems).

[0114] Such an approach exemplifies the ability to generate interneuron precursors from mouse ES cells. Using the methods and enhancers SEQ ID NOS:1-145, it is further possible to generate interneuron precursors from human ES and iPS cells, making them available for human transplantation and for molecular/cellular analyses. These approaches are also directly applicable to generating other neuronal cell types, such as cortical and striatal projection neurons, which have implications for many human diseases.

[0115] There are several reasons why it is important to generate these interneurons in vitro from stem cells. There are now viable experimental approaches to elucidate the genetic and molecular mechanisms that underlie these neuropsychiatric disorders through the generation of induced pluripotent stem cells, called iPS cells, from the skin of patients. Scientists are now challenged to develop methods to program iPS cells to become the specific types of brain cells that are most relevant to each specific brain disease. Therefore, the present constructs and examples incorporating the enhancers SEQ ID NOS:1-145 can be used to drive the production of specific subtypes of these cells from human stem cells. SEQ ID NOS:1-145 enable one to make these types of neurons from iPS cells to study human disease, and potentially to the production of these neurons for transplantation into patients whose interneurons are deficient in regulating their brain function.

[0116] Using iPS cell technology, one could generate these cells from patients with various forms of epilepsy, schizophrenia and autism, and determine whether abnormal interneuron function could contribute to these disorders because of cellular and/or electrophysiological defects. Furthermore, the approach herein described is general and readily applicable to the generation of other brain cells. Roughly 30% of epileptic patients continue to have disabling seizures despite maximum pharmacotherapy; many require surgical resection of the epileptic focus, and therefore could benefit from a cell-based therapy.

[0117] Thus, in some embodiments, enhancers SEQ ID NOS:1-145 can be used for generating several types of neurons, interneurons or other neural cell types, by driving expression and directing neuronal stem cell differentiation. For examples, SEQ ID NO: 73(hs671) can be used to generate cortical projection neurons by directing differentiation of DP, LP and VP progenitors. SEQ ID NOS: 63, 67 and 69 (hs631, hs643, and hs653 respectively) can be used to generate hippocampal projection neurons by directing differentiation of MP progenitors. SEQ ID NOS: 21(hs242) and 35 (hs342) can be used to generate striatal neurons by directing differentiation of LGE/CGE progenitors. SEQ ID NO: 35 (hs342) can be used to generate pallial neurons by directing differentiation of MGE progenitors. SEQ ID NOS: 35 (hs342) can be used to generate cortical interneurons by directing differentiation of MGE and LGE/CGE progenitors.

[0118] In one embodiment, a sample containing non-pluripotent cells (e.g., fibroblasts) can be obtained from a patient suffering from a neural disease or disorder and transfected with stem cell-associated genes to induce pluripotency. Induced pluripotent stem cells (iPS cells) can be generated by transfection of the fibroblasts with a vector containing known stem cell-associated genes from gene families such as KLF, OCT3/4 (POU5F1), MYC and SOX genes, and at least one enhancer of SEQ ID NOS:1-145 and an inducible promoter. The enhancer is selected based upon the preferred subregion of expression as identified in Table 2.

[0119] In another embodiment, a sample containing non-pluripotent cells (e.g., fibroblasts) can be obtained from a human, for example, from a patient suffering from a neural disease or disorder, and transfected with a gene or combination of genes to directly induce a neural fate. Induced neural cells (iN cells) can be generated by transfection of the fibroblasts with a vector containing genes known to be important in neural development (for example, ASCL1, BRN2, MYT1L), and at least one enhancer of SEQ ID NOS:1-145 and an inducible promoter. The enhancer is selected based upon the preferred subregion of expression as identified in Table 2. Alternatively, an enhancer can be introduced into the iN cells after the neural induction step.

[0120] Methods describing appropriate genes and vectors and fibroblast induction are described in Desponts, Shi; Desponts, Caroline; Do, Jeong Tae; Hahm, Heung Sik; Schöler, Hans R.; Ding, Sheng (2008). “Induction of pluripotent stem cells from mouse embryonic fibroblasts by Oct4 and Klf4 with small-molecule compounds”. Cell Stem Cell 3 (5): 568-74; Zhou, Wi; Freed, Curt R. (2009). “Adenoviral gene delivery can reprogram human fibroblasts to induced pluripotent stem cells”. Stem Cells 27 (11): 2667-74.; and Yamanaka, et. al (2006). Induction of pluripotent stem cells from mouse embryonic and adult fibroblast cultures by defined factors. Cell 126(4):663-676; Boland, M Y; Hazen, Jennifer L.; Nazor, Kristopher L.; Rodriguez, Alberto R.; Gifford, Wesley; Martin, Greg; Kupriyanov, Sergey; Baldwin, Kristin K. (2009). “Adult mice generated from induced pluripotent stem cells”. Nature 461 (7260): 91-4; Vierbuchen T, Ostermeier A, Pang Z P, Kokubu Y, Südhof T C, Wernig M., “Direct conversion of fibroblasts to functional neurons by defined factors,” Nature. 2010 Feb. 25; 463(7284):1035-41. Epub 2010 Jan. 27; Pang Z P, Yang N, Vierbuchen T, Ostermeier A, Fuentes D R, Yang T Q, Citri A, Sebastiano V, Marro S, Südhof T C, Wernig M., “Induction of human neuronal cells by defined transcription factors,” Nature. 2011 May 26; 476(7359):220-3; Lujan E, Chanda S, Ahlenius H, Südhof T C, Wernig M, “Direct conversion of mouse fibroblasts to self-renewing, tripotent neural precursor cells,” Proc Natl Acad Sci USA. 2012 Feb. 14; 109(7):2527-32. Epub 2012 Jan. 30, all of which are hereby incorporated by reference for all purposes.

[0121] Upon successful transfection and subsequent induction to iPS cells, the iPS cells can be identified and isolated using a reporter gene. In some embodiments, the vector contains a reporter gene as described above. In other embodiments, enhancers SEQ ID NOS:1-145 can be used to label several types of neural progenitor cells, neurons, interneurons or other neural cell types, by directing reporter expression. For examples, SEQ ID NO: 73(hs671) can be used to label cortical projection neurons by directing reporter expression of DP, LP and VP progenitor cells. SEQ ID NOS: 63, 67 and 69 (hs631, hs643, and hs653 respectively) can be used to label hippocampal projection neurons by directing reporter expression of MP progenitor cells. SEQ ID NOS: 21(hs242) and 35 (hs342) can be used to label striatal neurons by directing reporter expression of LGE/CGE progenitor cells. SEQ ID NO: 78 (hs692) can be used to label pallial interneurons by directing reporter expression of MGE progenitors. SEQ ID NOS: 35 (hs342) can be used to label cortical interneurons by directing reporter expression of MGE and LGE/CGE progenitors.

[0122] Isolation and purification of specific cell types can be carried out using known cellular isolation and purification techniques including but not limited to fluorescence-activated cell sorting (FACS), flow cytometry, or other optical, electrical or droplet based isolation or purification.

[0123] In other embodiments, it is contemplated that SEQ ID NOS:1-145 may be used in conjunction with other types of enhancers (e.g. ventral midbrain for dopamine neurons).

[0124] The use of molecular markers of specific cell states can be used for studying or detecting cell differentiation. In one embodiment, the enhancer driven selectable marker is used to identify and or purify a cell type. Expression of fluorescent proteins provide a means of identification of a particular cell state, and thus allow for selection and/or purification of those cells identified by the expressed protein. For example, dual reporter/selection lentiviruses can be made containing one or more of the enhancers of SEQ ID NOS:1-145 and an Hsp68 promoter or beta-globin minimal promoter to select and purify for specific cell types.

[0125] Thus, a method for detecting and isolating cell types comprising (1) providing a lentivirus having a promoter, reporter gene and an enhancer selected from SEQ ID NOS:1-145; (2) transfecting a stem cell with the lentivirus; (3) directing differentiation of the stem cell to the desired cell type and expression; (4) detecting reporter gene expression and (5) isolating cells using reporter gene.

[0126] In another embodiment, the enhancers SEQ ID NOS: 1-145 are used to generate specific types of cells (e.g. neurons, glia, etc.) from specific genotypic backgrounds (i.e. healthy individuals, or those with genetic predisposition to a particular disease [derived from iPS cells or other stem cells, or fibroblasts or other programmable cells]). Cells generated using the enhancers by such a method can then be used for screening or assaying drugs having a therapeutic effect. For examples, neurons from healthy individuals (cortical, striatal, motor neurons) could be used to test for neurotoxicity of a compound.), or cortical neurons from patient who has a neurodegenerative disease (e.g., ALS, Alzheimers, Huntington's, Parkinson's, frontotemporal dementia) could be tested for compounds that prolong the survival of the cells, or neurons from patient with a neurological disease that alters neuronal function (e.g., epilepsy caused by an electrophysiological, signaling, synaptic defect) could be tested for compounds that improve that aspect of neuronal function.

### Example 1

[0127] The experiments described herein aim to understand basic mechanisms that underlie the development of cortical interneurons. This Example and Example 2 are also described by Axel Visel, et al., in “A High-Resolution Enhancer Atlas of the Developing Telencephalon,” Cell, Volume 152, Issue 4, 14 Feb. 2013, Pages 895-908, and all the supplemental information, hereby incorporated by reference in their entirety. We are discovering regulatory elements (called enhancers) in the human genome that control gene expression in developing interneurons. In Example 1, we will study when and where these enhancers are expressed during mouse brain development. We will concentrate on identifying enhancers that control gene expression during development of specific types of cortical interneurons, although we hope to use this approach for additional cell types. We have identified and characterized where and when these enhancers are active. In Example 2 we will use the enhancers as tools in human stem cells to produce specific types of cortical interneurons in the test tube. The enhancers will be used to express proteins in the stem cells that will enable us purify only those cells that have specific properties (e.g. properties of cortical interneurons). We also plan to explore whether the human brain produces cortical interneurons in the same way as the mouse brain; this information is essential to identify molecular markers on the developing interneurons that could be used for further characterization and purification of the interneurons that we care generating in Example 2. While the examples focus on cortical interneuron subtypes, our work has general implications for the other types of brain cells our labs study, such as cortical and striatal neurons. In sum, the basic science mechanisms that we will discover will provide novel insights into how to generate specific types of neurons that can be used to study and treat brain diseases.

[0128] The telencephalon is the largest part of the mammalian forebrain with critical roles in cognition, behavior and neuropsychiatric disorders. A set of genes that control telencephalon development has been identified, but the regulatory sequences orchestrating their spatiotemporal expression are largely unknown. Here we describe an integrated genomic analysis and a comprehensive digital atlas of developmental telencephalon enhancer in vivo activities. Using non-coding sequence conservation and chromatin immunoprecipitation-sequencing (ChIP-seq) with the enhancer-associated p300 protein from embryonic mouse forebrain tissue, we identified over 4,600 forebrain candidate enhancer sequences. Focusing on genomic regions surrounding 79 genes with known roles in telencephalon development, 329 enhancer candidate sequences were characterized in transgenic reporter assays in day 11.5 mouse embryos. To explore forebrain enhancer activity patterns at high resolution, we generated serial brain sections for 145 forebrain enhancers. Annotation to a standardized neuroanatomical model revealed functionally related groups of enhancers that drive expression to distinct domains of the telencephalon and contain different sets of subregion-associated sequence motifs. Taken together, our comprehensive analysis of the regulatory architecture of mammalian telencephalon development identified thousands of high-confidence telencephalic enhancer candidates for genetic studies of neurodevelopmental disorders and provides a primary resource for investigating gene regulatory mechanisms of telencephalon development.

[0129] The telencephalon is the seat of consciousness, higher cognition, language, motor control and other pivotal human brain functions (Wilson, S W, Rubenstein J L, Induction and dorsoventral patterning of the telencephalon. Neuron 28, 641 (2000)). Impaired telencephalic development and function is associated with major neuropsychiatric disorders including schizophrenia and autism (Lewis D A, Sweet R A, Schizophrenia from a neural circuitry perspective: advancing toward rational pharmacological therapies. J Clin Invest 119, 706 (2009); Walsh, C A, Morrow E M, Rubenstein J L, Autism and brain development. Cell 135, 396 (2008)). Genetic and developmental studies in mice have identified many of the genes required for embryonic specification, morphological development and functional differentiation of the telencephalon (Hebert, J M, Fishell G, The genetics of early telencephalon patterning: some assembly required. Nat Rev Neurosci 9, 678 (2008); Hoch, R V, Rubenstein J L, Pleasure S, Genes and signaling events that establish regional patterning of the mammalian forebrain. Semin Cell Dev Biol 20, 378 (2009)). Significant progress has also been made towards defining spatially resolved gene expression patterns in the developing and adult mouse brain on a genomic scale (Gong, et al., A gene expression atlas of the central nervous system based on bacterial artificial chromosomes. Nature 425, 917 (2003); Visel, A, Thaller C, Eichele G, GenePaint.org: an atlas of gene expression patterns in the mouse embryo. Nucleic Acids Res 32, D552 (2004); Gray, P A, Fu H, Luo P, Zhao Q, Yu J et al., Mouse brain organization revealed through direct genome-scale TF expression analysis. Science 306, 2255 (2004); Lein, E S, Hawrylycz M J, Ao N, Ayres M, Bensinger A et al., Genome-wide atlas of gene expression in the adult mouse brain. Nature 445, 168 (2007). These studies show that many genes involved in brain development are transcriptionally regulated in dynamic and precisely controlled spatiotemporal patterns. Many aspects of such complex expression patterns are controlled by distant-acting transcriptional enhancers (Visel A, Rubin E M, Pennacchio L A, Genomic views of distant-acting enhancers. Nature 461, 199 (2009)). However, the precise genomic location and in vivo activity patterns of enhancers active during brain development have been difficult to determine, since these sequences can be located at large distances from the genes they regulate. Moreover, their sequence code is not sufficiently understood to distinguish them reliably from non-functional genomic sequences by computational methods. Extreme non-coding sequence conservation coupled to transgenic reporter assays revealed first sizeable sets of in vivo brain enhancers, but the majority of enhancers discovered through such studies were active in embryonic structures other than the forebrain (Nobrega M A, Ovcharenko I, Afzal V, Rubin E M, Scanning human gene deserts for long-range enhancers. Science 302, 413 (2003); Pennacchio, et a., Nature 444, 499 (2006); Visel, et al., Nat Genet. 40, 158 (2008)). As a complementary approach, ChIP-seq with the enhancer-associated transcriptional co-activator protein p300 directly from ex vivo tissues enables the accurate genome-wide prediction of both the location and tissue-specific activity of in vivo enhancers (Visel A, Rubin E M, Pennacchio L A, Genomic views of distant-acting enhancers. Nature 461, 199 (2009)). Initial datasets obtained through this method, while limited in scope, demonstrated the general efficiency of this strategy (Visel, et al., Nature 461, 199 (2009)). In the present study, we have combined conservation- and ChIP-seq-based enhancer prediction with large-scale mouse transgenics and detailed histological analysis of enhancer activity patterns to explore on a genomic scale the enhancer architecture active during forebrain development.

[0130] To obtain a genome-wide set of forebrain enhancer candidate sequences, we collected forebrain tissue from approximately 200 mouse embryos (embryonic day [e]11.5) and performed tissue-ChIP-seq using an antibody for the enhancer-associated protein p300 (Visel A, Blow M J, Li Z, Zhang T, Akiyama J A et al., ChIP-seq accurately predicts tissue-specific activity of enhancers. Nature 457, 854 (2009)). Genome-wide enrichment analysis of these data led to the identification of 4,425 non-coding regions genome-wide that are distal from transcription start sites and significantly enriched in p300 binding in the e11.5 forebrain (See Table 1, complete data not shown). These sequences were thus predicted to be distant-acting forebrain enhancers. As a complementary approach to identify additional forebrain enhancers that act through p300-independent mechanisms, we also used extreme sequence conservation in conjunction with genomic location. Screening the genomic vicinity of 79 genes with a known role in forebrain development or function (Table 3) for the presence of sequences under extreme evolutionary constraint (Visel, et al, Nat Genet. 40, 158 (2008)) revealed a total of 231 additional candidate forebrain enhancer sequences (Table 4). These two datasets combined comprise a total of 4,656 noncoding sequence elements that are expected to be enriched in forebrain enhancers.

[0131] To validate sequences identified through either approach and define their respective in vivo activities in more detail, we selected 329 candidate elements for experimental testing. Nearly all of these selected elements were located near genes with a known function in the forebrain. The selected candidate enhancer sequences were amplified from human genomic DNA, cloned into an enhancer reporter vector (Hsp68-LacZ), and used to generate transgenic mice by pronuclear injection. Transgenic embryos were stained for LacZ activity at e11.5 and annotated using established reproducibility criteria (Pennacchio, et al., In vivo enhancer analysis of human conserved non-coding sequences. Nature 444, 499 (2006)). Only elements that drove expression to the same general subregion of the forebrain in at least three embryos resulting from independent transgenic integration events were considered reproducible forebrain enhancers. In total, 105 of 329 (32%) candidate sequences tested were reproducible forebrain enhancers at e11.5. Enhancer candidate sequences that overlapped p300 ChIP-seq peaks were more enriched in verifiable in vivo forebrain enhancers than extremely conserved sequences that showed no evidence of p300 binding (58% compared to 23%). Selected examples of reproducible forebrain enhancers whose in vivo activity was confirmed in transgenic mice are shown in FIG. 1. Sequence coordinates and annotations of all reporter expression patterns including reproducible staining in anatomical structures other than the forebrain are summarized in Table 5 and are accessible online through the Vista Enhancer Browser (Visel A, Minovitsky S, Dubchak I, Pennacchio L A, VISTA Enhancer Browser—a database of tissue-specific human enhancers. Nucleic Acids Res 35, D88 (2007)). The collection of reproducible forebrain enhancers identified through these experiments provides in vivo-derived functional annotations for a large number of noncoding sequences that are likely to play a role in regulating gene expression during forebrain development.

[0132] Close examination of whole-mount annotated data suggests that a variety of distinct subdomains of the forebrain are reproducibly targeted by the identified enhancer elements. To define the spatial specificities of telencephalon enhancers active at e11.5 in detail, we selected a total of 145 enhancers for in-depth analysis (Table 2). These sequences were selected from the 105 forebrain enhancers discovered in the present study and from complementary sets of forebrain enhancers identified at whole-mount resolution in previous enhancer screens (Pennacchio, et al., In vivo enhancer analysis of human conserved non-coding sequences. Nature 444, 499 (2006); Visel A, Blow M J, Li Z, Zhang T, Akiyama J A et al., ChIP-seq accurately predicts tissue-specific activity of enhancers. Nature 457, 854 (2009); Visel A, Rubin E M, Pennacchio L A, Genomic views of distant-acting enhancers. Nature 461, 199 (2009); Visel A, Prabhakar S, Akiyama J A, Shoukry M, Lewis K D et al., Ultraconservation identifies a small subset of extremely constrained developmental enhancers. Nat Genet. 40, 158 (2008). For each enhancer, a full set of contiguous coronal paraffin sections (average: 200 sections) was obtained. Full-resolution digital images of all 33,000 sections are available through the Vista Enhancer Browser (Visel A, et al. Nucleic Acids Res 35, D88 (2007)). Selected sections of patterns driven by different enhancers in the subregions of the pallium and subpallium are shown in FIGS. 2 and 3, illustrating the diversity of spatial specificities observed. Analysis of expression boundaries for individual enhancers confirmed that the reproducibility of patterns observed in whole-mount embryos was generally recapitulated at the histological level. Taken together, these data provide a large collection of enhancers with well-defined in vivo activities. All enhancers characterized through these efforts are freely available from the authors as reagents to drive expression of reporter or biologically active genes reproducibly to specific forebrain subregions of interest.

[0133] Referring now to FIG. 3, in order to facilitate computational analysis of this forebrain enhancer histology atlas, we devised a standardized neuroanatomical annotation scheme for this stage of telencephalon development (FIG. 6). This scheme considers morphological, developmental and molecular aspects of development {Puelles et al., Pallial and subpallial derivatives in the embryonic chick and mouse telencephalon, traced by the expression of the genes Dlx-2, Emx-1, Nkx-2.1, Pax-6, and Tbr-1. J Comp Neurol 424, 409 (2000), #335} to subdivide the e11.5 telencephalon and adjacent diencephalic regions into 11 major domains, of which 5 are pallial (dorsal) and 4 are subpallial (ventral) components of the actual telencephalon (FIGS. 2a and 2c). These domains can be further subdivided into ventricular, subventricular (where present at e11.5) and mantle zone. All telencephalon enhancer activity patterns examined in this study were annotated using this standardized annotation scheme, in some cases complemented by additional descriptions of aspects of patterns that further subdivide the standardized domains or are restricted to subsets of cells (Table 2). The standardized annotations assigned to each enhancer through this systematic annotation effort enable systematic comparisons and computational analysis of enhancer activity patterns, as well as a comparison to gene expression patterns of relevant transcription factors at this stage of development.

[0134] To systematically test whether enhancer activity patterns recapitulate the expression patterns of nearby genes, we performed correlation analysis based on our standardized annotation scheme. We annotated the mRNA expression patterns of 113 genes with known or suggested roles in forebrain development (predominantly transcription factors) based on expression information available in public databases and/or the literature, using the same annotation scheme as for enhancer activity patterns (Table 6). We then compared these gene expression patterns to the activity patterns of enhancers located in the genomic vicinity (up to 1 Mb away) of the genes. Among 81 enhancers that were assigned to nearby genes with annotated forebrain expression patterns, we observed that in 67 cases (83%) at least one of the forebrain subregions in which the enhancer was active also showed evidence of mRNA expression. Overall, we found a highly significant correlation between the activity patterns of enhancers and telencephalic expression patterns of nearby annotated genes (P=0.0003, Mann-Whitney test, FIG. 4). These results support that the telencephalon enhancers identified and annotated in this study contribute to the spatial RNA expression patterns of nearby genes.

TABLE 7
Top enriched annotations of putative target genes near 4,430
ChIP-seq predicted forebrain enhancers.

| | | | |
|---|---|---|---|
| | | | Binom |
| | | Binom | Fold |
| | | Raw P- | Enrich- |
| Rank* | Mouse Phenotypes | Value | ment |

Top enriched annotations near predicted mouse e11.5 forebrain enhancers

| | | | |
|---|---|---|---|
| 1 | abnormal forebrain development | 7.8E-44 | 2.5 |
| 2 | abnormal brain white matter morphology | 1.5E-43 | 2.4 |
| 3 | abnormal nervous system tract | 3.4E-42 | 2.4 |
| 4 | abnormal brain commissure morphology | 6.6E-42 | 2.5 |
| 5 | abnormal brain ventricle/choroid plexus | 2.5E-39 | 2.2 |
| | morphology | | |
| 6 | abnormal dorsal telencephalic commissure | 2.8E-39 | 2.8 |
| | morphology | | |
| 7 | abnormal corpus callosum morphology | 3.6E-39 | 2.8 |
| 8 | abnormal telencephalon development | 1.2E-33 | 2.7 |
| 9 | abnormal brain ventricle morphology | 4.6E-32 | 2.2 |
| 10 | abnormal neural tube closure | 1.8E-30 | 2.0 |

Top enriched annotations near predicted human fetal cortex enhancers

| 1 | abnormal brain ventricle/choroid plexus | 3.8E-19 | 2.1 |
|---|---|---|---|
| | morphology | | |
| 2 | abnormal telencephalon development | 1.9E-18 | 2.6 |
| 3 | abnormal forebrain development | 3.0E-18 | 2.2 |
| 5 | abnormal neuronal precursor proliferatio | 7.1E-15 | 3.0 |
| | | | Binom |
| | | Binom | Fold |
| | | Raw P- | Enrich- |
| | GO Terms (Biological Process) | Value | ment |
| 1 | negative regulation of transcription from | 1.7E-35 | 2.0 |
| | RNA polymerase II promoter | | |
| 2 | forebrain development | 1.6E-33 | 2.1 |
| 3 | cell fate commitment | 3.8E-28 | 2.1 |
| 4 | central nervous system neuron differentiation | 4.4E-25 | 2.3 |
| 5 | oligodendrocyte differentiation | 2.0E-22 | 3.6 |
| 6 | Wnt receptor signaling pathway | 2.1E-19 | 2.1 |
| 7 | negative regulation of neuron differentiation | 3.0E-19 | 2.8 |
| 8 | pallium development | 3.9E-18 | 2.5 |
| 9 | cell fate specification | 1.7E-17 | 2.7 |
| 10 | telencephalon development | 1.1E-16 | 2.0 |

[0135] Table 7 top panel shows unsupervised enrichment analysis (McLean C Y, Bristor D, Hiller M, Clarke S L, Schaar B T et al., GREAT improves functional interpretation of cis-regulatory regions. Nat Biotechnol 28, 495 (2010), Cummings M P, Segal M R, Few amino acid positions in rpoB are associated with most of the rifampin resistance in Mycobacterium tuberculosis. BMC Bioinformatics 5, 137 (2004)) of annotated genes in the proximity of p300/CBP distal peaks. The test set of 4,430 genomic regions picked 3,955 genes (22%) of all 18,038 genes. The 10 most significantly enriched terms from the Mouse Phenotypes ontology are shown. Highly significant enrichment of predicted forebrain enhancers near genes with relevant phenotypes is observed (bold terms). * Only terms exceeding 2-fold binomial enrichment were considered and ranked by binomial p-values.

[0136] Nine of the ten most significantly enriched terms from the Mouse Phenotypes ontology are relevant to forebrain development. The only non-relevant phenotype was rank 10, “abnormal neural tube closure” (not shown). Bottom: For genes in the proximity of p300/CBP candidate enhancers identified from human fetal cortex, four of the five most significantly enriched terms are relevant to forebrain development. The only non-relevant phenotype was rank 4, “absent Purkinje cell layer” (not shown), which was associated with predicted cortical enhancers located near genes that play roles both in cerebral cortex and cerebellum development, including CCND1, CCND2, CDK5R1, LHX1, LHX5. In each species, only terms exceeding 2-fold binomial enrichment were considered and ranked by P-value (binomial raw P-values).

[0137] Table 7 bottom panel shows the top enriched GO Term annotations of putative target genes near 4,425 ChIP-seq predicted forebrain enhancers. Analysis was performed as shown in Table 1. The 10 most significantly enriched terms from the GO Biological Process ontologys are shown. Enrichment of predicted forebrain enhancers near genes with relevant functions is observed (bold terms). * Only terms exceeding 2-fold binomial enrichment were considered and ranked by binomial p-values.

[0138] In addition to the high-resolution comparisons of enhancer and gene activity patterns, we also assessed whether the genome-wide set of 4,425 forebrain enhancer candidate sequences identified by ChIP-seq from forebrain tissues is overall significantly associated with genes with known functions in the telencephalon. Using unbiased genome-wide enrichment analysis (24), we observed highly significant enrichment of forebrain candidate enhancers near genes with relevant biological functions and mouse phenotypes (Table 7). These observations support on a genomic scale that the large set of forebrain candidate enhancers predicted by ChIP-seq in this study is enriched near genes that are involved in telencephalon development.

[0139] Sequence Analysis of Subregion-Specific Enhancers.

[0140] A large set of telencephalon enhancers, analyzed at high spatial resolution and annotated to a standardized scheme, offers the possibility to examine sequence features that are associated with in vivo activity in different telencephalic subregions. To explore this regulatory code, we used the Random Forests (RF) method, a tree-based classification approach that is particularly effective for this purpose (See for example, Breiman L, Random Forests. Machine Learning 45, 5 (2001); Bureau A, Dupuis J, Falls K, Lunetta K L, Hayward B et al., Identifying SNPs predictive of phenotype using random forests. Genet Epidemiol 28, 171 (2005); Cummings M P, Segal M R, Few amino acid positions in rpoB are associated with most of the rifampin resistance in Mycobacterium tuberculosis. BMC Bioinformatics 5, 137 (2004); Lunetta K L, Hayward L B, Segal J, Van Eerdewegh P, Screening large-scale association study data: exploiting interactions using random forests. BMC Genet. 5, 32 (2004)). Based on the broad expression characteristics of the annotated enhancers within the telencephalon, we trained a RF classifier to discriminate between enhancers active in 1. pallium only, 2. pallium and subpallium (compound pattern), or 3. subpallium only, and a background set of random genomic sequences with matching length and GC content (see FIG. 5 and Methods). Classification is based on the presence or absence of combinations of sequence motifs matching known transcription factor binding sites (Matys V, Kel-Margoulis O V, Fricke E, Liebich I, Land S et al., TRANSFAC and its module TRANSCompel: transcriptional gene regulation in eukaryotes. Nucleic Acids Res 34, D108 (2006), Bryne J C, Valen E, Tang M H, Marstrand T, Winther O et al., JASPAR, the open access database of transcription factor-binding profiles: new content and tools in the 2008 update. Nucleic Acids Res 36, D102 (2008)). The five most relevant motifs distinguishing the three classes of enhancers and their respective importance are shown in FIG. 5b (for additional motifs, see FIG. 3 and Table 8). We did not observe any single motif that was sufficient to accurately discriminate between the different classes of enhancers, suggesting that only the combinatorial binding of multiple transcription factors determines the observed spatial regulatory activity. The majority of the most discriminatory motifs (at least 60% of the top 15 motifs characterizing enhancers active in each of the telencephalic subregions considered) correspond to predicted binding sites for homeodomain-containing transcription factors, consistent with the known critical role of these proteins in telencephalon development (Hebert J M, Fishell G, The genetics of early telencephalon patterning: some assembly required. Nat Rev Neurosci 9, 678 (2008)). FIG. 8 summarizes the enrichment of the 15 most relevant motifs for enhancer activity in the three different telencephalic subregions considered. Despite possible ambiguities associated with computational transcription factor binding site predictions, the RF classifier accurately predicts approximately 80% of the sequences (see Methods, Table 9). The classifier is notably good at distinguishing enhancers active in pallium only, pallium and subpallium, and subpallium only from background genomic sequences, with accuracies ranging from 0.78 to 0.92, as measured by the area under the receiver operating characteristic curve (FIG. 5b). Furthermore, the classifier can separate enhancers controlling expression in the subpallium from those active in the pallium with reasonable accuracy (Table 9).

[0141] In addition, sequence motifs with high quantitative importance for discriminating between different classes of telencephalon enhancers are overall more conserved in evolution compared to non-important motifs, further supporting their functional relevance (FIG. 9). These results show that different sets of transcription factor binding sites are associated with enhancers active in different subregions of the developing telencephalon and highlight the value of high-resolution annotation of enhancer activity patterns for computational studies of their regulatory code.

[0142] Beyond such functional genomic studies, the enhancers identified and characterized as SEQ ID NOS:1-145 provide a comprehensive set of molecular reagents that can be used to target gene expression to defined subregions of the developing brain, or to defined cell states when differentiating stem cells in vitro. This will enable tissue-specific homologous recombination and deletion strategies or expression of reporter and selectable genes.

[0143] Human Brain ChIP-Seq.

[0144] Our large-scale transgenic testing and high-resolution analysis of telencephalon enhancers focused on sequences that are highly conserved in evolution, with the goal being to characterize the most conserved core regulatory architecture of mammalian telencephalon development. However, epigenomic methods also enable the systematic discovery of poorly conserved and lineage-specific enhancers (Schmidt et al., Five-vertebrate ChIP-seq reveals the evolutionary dynamics of transcription factor binding, Science, 328 (2010), pp. 1036-1040). To explore possible differences between human and mouse telencephalon enhancers in greater detail, we determined the genome-wide occupancy of the enhancer-associated proteins p300/CBP in human fetal (gestational week 20) cortex (FIGS. 20A and 20B). ChIP-seq analysis identified 2,275 peaks (candidate enhancers) genome wide that were located at least 2.5 kb from the nearest transcript start site. Comparison with transcriptome data from human fetal cortex tissue revealed a 2.7-fold enrichment in candidate enhancers within 2.5-20 kb of the transcript start sites of genes highly expressed in fetal human cortex (p<1×10⁻¹⁴, binomial distribution), with significant enrichment up to 220 kb away from promoters (p<0.001, binomial distribution, FIG. 20C). In contrast, no enrichment of p300/CBP binding sites was observed near genes highly expressed in other tissues. Similar to candidate enhancers predicted from mouse e11.5 forebrain, unsupervised statistical enrichment analysis of functional gene annotations (McLean et al., 2010) showed significant association with genes implicated in nervous-system-related phenotypes (Table 7). Although many extremely conserved noncoding sequences in the human genome are enhancers active in the developing nervous system (Pennacchio et al., 2006), we observed that one-third (36.5%) of ChIP-seq-predicted human brain candidate enhancers are under weak (phastCons<350) or no detectable evolutionary constraint, suggesting that subsets of human brain enhancers may not be functionally conserved in mice.

[0145] At gestational week 20, the human cortex is considerably further developed than the mouse pallium at e11.5 and instead corresponds broadly to early postnatal stages in mouse (Clancy et al., _Extrapolating brain development from experimental species to humans Neurotoxicology, 28 (2007), pp. 931-937). To enable a direct experimental comparison between the two species, we performed p300/CBP ChIP-seq on mouse postnatal (P0) cortex tissue. Using identical methods to those used for human tissue, we identified 1,132 candidate enhancers (distal ChIP-seq peaks). The majority (58%) of human-derived peaks showed significant or suggestive (subsignificant) enrichment in ChIP-seq reads at the orthologous site in the mouse genome (FIG. 20D). The remaining 42% either showed no enrichment in the orthologous mouse region or were not alignable to the mouse genome. Though the lower sequencing coverage in the mouse data set may lead to an underestimation of mouse—compared to human-specific peaks (compare FIGS. 20D and 20E), the presence of 307 peaks in nonalignable regions of the human genome (FIG. 20D) supports that a normegligible proportion of human brain enhancers emerged in evolution after the divergence of primates and rodents from their last common ancestor.

[0146] Similar to the large collection of telencephalon enhancers identified and characterized at e11.5, ChIP-seq peaks derived from human fetal cortex are expected to include enhancers with a variety of in vivo activity patterns. To illustrate this, we examined the in vivo activities of candidate enhancers from human fetal cortex in postnatal transgenic mice. Two examples of such enhancers driving reproducible expression in a minimum of three independent transgenic animals are shown in FIGS. 20E-20K. Consistent with the ChIP-seq prediction, both enhancers were active in the cortex (red arrows) as well as in additional but distinct and reproducible regions of the telencephalon.

[0147] To illustrate the value of the genome-wide sets of human and mouse candidate enhancers for the interpretation of human genetic data sets, we compared the genomic position of these sequences with different catalogs of regions in the human genome implicated in neurodevelopmental, neurological, or neuropsychiatric diseases. We intersected the genome-wide sets of candidate enhancers identified in the three different ChIP-seq experiments with (1) lead single-nucleotide polymorphisms (SNPs) from genome-wide association studies of relevant traits (Hindorff et al., Potential etiologic and functional implications of genome-wide association loci for human diseases and traits, Proc. Natl. Acad. Sci. USA, 106 (2009), pp. 9362-9367), (2) catalogs of syndromic microdeletions and microduplications (Firth et al., DECIPHER: Database of Chromosomal Imbalance and Phenotype in Humans Using Ensembl Resources, Am. J. Hum. Genet., 84 (2009), pp. 524-533), and (3) a set of autism-associated rare copy-number variants (Marshall et al., Structural variation of chromosomes in autism spectrum disorder, Am. J. Hum. Genet., 82 (2008), pp. 477-488; Szatmari et al., Mapping autism risk loci using genetic linkage and chromosomal rearrangements, Nat. Genet., 39 (2007), pp. 319-328). Fourteen lead SNPs from genome-wide association studies, including SNPs associated with attention deficit hyperactivity disorder, bipolar disease, and schizophrenia, were found to be located within predicted forebrain enhancers. Moreover, 381 enhancers mapped within recurrent microdeletions or microduplications associated with neurological phenotypes, and 421 enhancers overlapped copy-number variants present in autism cases, but not healthy controls. Though further experimental studies will be required to examine possible causal roles of variants affecting enhancer sequences, the genome-wide sets of candidate enhancers identified from human and mouse brain tissue through this study provide a starting point to explore the role of telencephalon enhancers in human diseases.

[0148] Telencephalon Enhancers as Molecular Reagents.

[0149] The enhancers described in our high-resolution atlas can be used as molecular reagents to drive in vivo expression of reporter or effector genes to specific telencephalic subregions of interest, owing to the reproducibility of their activity patterns (FIG. 21A). To illustrate some of the resulting applications, we coupled enhancer hs1006, associated with the WNT8B gene, to a minimal Hsp68 promoter, followed by a tamoxifen-inducible Cre recombinase (CreER^{T2}), an internal ribosomal entry site, and a green fluorescent protein (GFP) reporter (FIG. 21B). In stable transgenic mouse lines generated with this construct, termed CT2IG-hs1006, GFP expression at e11.5 was indistinguishable from LacZ reporter expression (FIGS. 21A and 21B). GFP expression in these stable lines facilitates a temporally resolved mapping of enhancer activity. A comparison of GFP activity at e12.5, e15.5, and e17.5 with Wnt8b RNA expression reveals that enhancer activity spatially coincides with Wnt8b gene expression, indicating that this enhancer controls region-specific expression of the gene over an extended period of prenatal telencephalon development.

[0150] Because expression of the compound effector/reporter transcript in CT2IG-hs1006 mice faithfully resembled Wnt8b expression across multiple stages of development, the chemically inducible CreER^{T2} recombinase can be used for spatially and temporally highly restricted genomic recombineering applications such as neuronal fate mapping studies. To demonstrate this, we crossed CT2IG-hs1006 mice with Rosa26-LacZ mice (FIG. 21B) (Indra et al., Temporally-controlled site-specific mutagenesis in the basal layer of the epidermis: comparison of the recombinase activity of the tamoxifen-inducible Cre-ER(T) and Cre-ER(T2) recombinases, Nucleic Acids Res., 27 (1999), pp. 4324-4327). Tamoxifen induction of CreER^{T2} in pregnant compound CT2IG-hs1006:Rosa26-LacZ mice at e10.5 leads to recombination only in the small proportion of pallial cells in which the enhancer is active at this time point. LacZ staining at later stages revealed the spatial fate of cells in which the enhancer was active at e10.5. For example, hs1006-driven e10.5→e12.5 fate mapping marked pallial cell populations with a distribution that is clearly distinct from hs1006 activity at this time point (compare e12.5 patterns in FIGS. 21C and 21D). These data highlight the utility of these enhancers to precisely drive gene expression in the developing brain and their value as a rich resource for a diversity of uses.

[0151] This work provides a comprehensive resource for basic studies of telencephalon enhancers. Our targeted screen identified the genomic location of thousands of candidate enhancers putatively active in the embryonic forebrain. The mapping and annotation of the activity patterns of nearly 150 human telencephalon enhancers at histological resolution in transgenic mice provide insight into the regulatory architecture of individual genes that are required for forebrain development and will facilitate studies of molecular genetic pathways by identifying the genomic regions to which upstream transcription factors bind.

[0152] Our analysis revealed several cases of enhancers that drive similar patterns and are associated with the same gene (e.g., FIG. 4B) in a manner reminiscent of the “shadow enhancers” observed in invertebrate models (Frankel et al., Phenotypic robustness conferred by apparently redundant transcriptional enhancers, Nature, 466 (2010), pp. 490-493; Hong et al., Shadow enhancers as a source of evolutionary novelty, Science, 321 (2008), p. 1314). The data provided through this work will support the identification of minor spatial activity differences between such enhancers, as well as the functional exploration of their apparent redundancies. It is also remarkable that a large proportion of enhancers examined in this study drove patterns that were at least partially different from all other enhancers examined, highlighting the complexity of the developing forebrain, as well as the regulatory sequence code orchestrating its development.

[0153] The motif-based classifiers derived from enhancers active in different subregions of the telencephalon demonstrate the value of systematically annotated enhancer activity data sets for computational studies aimed at deciphering the correlation between the transcription factor binding sites present in an enhancer and its precise spatial activity pattern. Beyond such functional genomic studies, the enhancers identified and characterized in this work provide a comprehensive set of molecular reagents that can be used to target gene expression to defined subregions of the developing brain or to defined cell states when differentiating stem cells in vitro. This will enable tissue-specific homologous recombination and deletion strategies or expression of reporter and selectable genes, as illustrated in FIG. 21.

[0154] Finally, results from this study are expected to enable and facilitate the functional genomic exploration of the role of enhancers in human brain disorders. There is accumulating evidence that non-coding sequence variants, as well as copy number variation in coding and non-coding portions of the genome have important impacts on a wide spectrum of disorders including bipolar, schizophrenia, autism, intellectual disability and epilepsy (See Visel A, Rubin E M, Pennacchio L A, Genomic views of distant-acting enhancers. Nature 461, 199 (2009); Durbin R M, Abecasis G R, Altshuler D L, Auton A, Brooks L D et al., A map of human genome variation from population-scale sequencing. Nature 467, 1061 (2010), Sebat J, Lakshmi B, Malhotra D, Troge J, Lese-Martin C et al., Strong association of de novo copy number mutations with autism. Science 316, 445 (2007); International Schizophrenia Consortium, Rare chromosomal deletions and duplications increase risk of schizophrenia. Nature 455, 237 (2008); Malhotra D, McCarthy S, Michaelson J J, Vacic V, Burdick K E et al., High frequencies of de novo CNVs in bipolar disorder and schizophrenia. Neuron 72, 951 (2011); Cooper G M, Coe B P, Girirajan S, Rosenfeld J A, Vu T H et al., A copy number variation morbidity map of developmental delay. Nat Genet. 43, 838 (2011); Walsh T, McClellan J M, McCarthy S E, Addington A M, Pierce S B et al., Rare structural variants disrupt multiple genes in neurodevelopmental pathways in schizophrenia. Science 320, 539 (2008); Vacic V, McCarthy S, Malhotra D, Murray F, Chou H H et al., Duplications of the neuropeptide receptor gene VIPR2 confer significant risk for schizophrenia. Nature 471, 499 (2011)). However, owing to the incomplete genomic annotation of tissue-specific in vivo enhancers, the functional interpretation of non-coding sequence or copy number variants remains a major challenge; hence few potentially causative connections linking neurological traits to molecular variation in enhancers have been identified (e.g., Poitras L, Yu M, Lesage-Pelletier C, Macdonald R B, Gagne J P et al., An SNP in an ultraconserved regulatory element affects Dlx5/Dlx6 regulation in the forebrain. Development 137, 3089 (2010)). Many of the genes near the telencephalon enhancers we identified and characterized herein have been directly implicated in neurological or neuropsychiatric disorders (e.g., 39-45). Thus, the systematic mapping and high-resolution analysis of telencephalon enhancers through this work is expected to be extremely useful in providing functional genomic insights to guide studies that will mechanistically relate individual non-coding sequence and copy number variants to brain disorders.

### Materials and Methods

[0155] Chromatin immunoprecipitation followed by sequencing (ChIP-seq). ChIP-seq with a p300 antibody (rabbit polyclonal anti-p300 (C-20), Santa Cruz Biotechnology) on forebrain tissue isolated from e11.5 CD-1 strain mouse embryos was performed according to previously described procedures (Visel A, Blow M J, Li Z, Zhang T, Akiyama J A et al., ChIP-seq accurately predicts tissue-specific activity of enhancers. Nature 457, 854 (2009)). To improve analysis depth, reads resulting from massive-parallel sequencing were enriched with reads from a previously described forebrain p300 ChIP-seq dataset (generated using the same antibody) and analyzed alongside forebrain input DNA reads (Visel A, et al., Nature 457, 854 (2009)). All reads were mapped to the mouse genome (mm9) using the Burrows-Wheeler Alignment (BWA) tool (Li H, Durbin R, Fast and accurate short read alignment with Burrows-Wheeler transform. Bioinformatics 25, 1754 (2009)). Repetitively mapped reads (mapping to multiple sites) and likely PCR artifacts (multiple reads mapping with identical start sites) were removed, resulting in 5,450,531 and 4,454,682 reads from forebrain p300 ChIP and forebrain input DNA samples respectively. P300-enriched regions were identified using CCAT (Xu H, Handoko L, Wei X, Ye C, Sheng J et al., A signal-noise model for significance analysis of ChIP-seq with negative control. Bioinformatics 26, 1199 (2010)), using default parameters for ‘histone’ ChIP-Seq, except for minscore=2. Enriched regions were filtered to remove those with: i) a mapping site located in an unassembled genomic fragment, ii) an FDR<0.2, iii) a CCAT enrichment score of <6.5, iv) a sample/control read depth ratio of <2, v) overlap with another CCAT peak with a higher-score region, and vi) length>7 kb. Finally, peaks within 5 kb of the nearest transcript start site were excluded as likely promoters, resulting in 4,425 p300-marked candidate forebrain enhancers (entire table not shown).

[0156] Transgenic mouse assays. Enhancer candidate regions (see Table 1 for sequence coordinates) were amplified by PCR (see enhancer.lbl.gov website for primer sequences) from human genomic DNA and cloned into an Hsp68-promoter-LacZ reporter vector using Gateway (Invitrogen) cloning as previously described (Pennacchio L A, Ahituv N, Moses A M, Prabhakar S, Nobrega M A et al., In vivo enhancer analysis of human conserved non-coding sequences. Nature 444, 499 (2006)., Kothary R, Clapoff S, Brown A, Campbell R, Peterson A et al., A transgene containing lacZ inserted into the dystonia locus is expressed in neural tube. Nature 335, 435 (1988)). Transgenic mouse embryos were generated by pronuclear injection. F₀ embryos were collected at E11.5 and stained for LacZ activity as previously described in Pennacchio L A, Ahituv N, Moses A M, Prabhakar S, Nobrega M A et al., In vivo enhancer analysis of human conserved non-coding sequences. Nature 444, 499 (2006) and hereby incorporated by reference. Only patterns that were observed in at least three different embryos resulting from independent transgenic integration events of the same construct were considered reproducible. In the case of reproducible forebrain activity, subregional activity patterns (to the extent recognizable at whole-mount resolution) were taken into account; elements that drove LacZ activity to different regions of the forebrain in different transgenic embryos (as assessed by whole-mount staining) were not annotated reproducible forebrain enhancers and not considered for further analysis by sectioning.

[0157] Sectioning. LacZ-stained embryos were embedded in paraffin, sectioned in coronal orientation and counter-stained with eosin using standard protocols. Serial sets of sections were digitally photographed and uploaded to the Vista Enhancer Browser (http://enhancer.lbl.gov). Annotation of detailed telencephalic activity patterns was performed using a standardized neuroanatomical annotation scheme (FIG. 6) and recorded in tabulated format for computational downstream analysis (Table 6).

[0158] Dlx2 and Ascl1 were selected for luciferase reporter assays due to their well-established roles in subpallial development and because they are representatives of two major groups of transcription factors found among the top motifs of the subpallium classifier (see Experimental Procedures described herein). P19 cells were grown by previously described methods (Farah et al., Generation of neurons by transient expression of neural bHLH proteins in mammalian cells, Development, 127 (2000), pp. 693-702).

[0159] Images of whole-mount-stained embryos and full sets of e11.5 coronal brain sections are available through the Vista Enhancer Browser (enhancer.lbl.gov website). All enhancer reporter vectors described in this study are freely available. In addition, archived surplus transgenic embryos for many constructs can be made available upon request for complementary studies. The genome-wide set of ChIP-seq peaks derived from mouse e11.5 forebrain is provided in Table S1A in Visel et al., Cell, Volume 152, Issue 4, 14 Feb. 2013, Pages 895-908, hereby incorporated by reference. Raw data and additional ChIP-seq data sets from postnatal mouse and fetal human cortex are available from GEO under accession number GSE42881, also hereby incorporated by reference.

### Random Forest Classifiers.

[0160] Enhancer datasets. We separated the experimentally assayed forebrain enhancers into non-overlapping classes of pallium (46), subpallium (44), and pallium and subpallium (18) enhancers, according to the reporter gene expression patterns driven by the enhancers. In addition, for each enhancer, we sampled 10 random sequences from the human genome, with matching length, GC- and repeat-content (background set).

[0161] Enhancer similarity. A random forest (RF) is a collection of decision trees. Therefore, the proximity between two enhancer sequences can be measured as the frequency with which they are assigned to the same forebrain subregion. The proximity matrix constructed in such way can be visualized using multidimensional scaling (MDS, FIG. 10)

[0162] Enhancer Representation. Enhancers were transformed into 1064-dimensional feature vectors, where each feature corresponds to a binding site in the TRANSFAC (Matys V, Kel-Margoulis O V, Fricke E, Liebich I, Land S et al., TRANSFAC and its module TRANSCompel: transcriptional gene regulation in eukaryotes. Nucleic Acids Res 34, D108 (2006)) or JASPAR (Bryne J C, Valen E, Tang M H, Marstrand T, Winther O et al., JASPAR, the open access database of transcription factor-binding profiles: new content and tools in the 2008 update. Nucleic Acids Res 36, D102 (2008)) databases. Significant occurrences of binding sites in the sequences were determined with MAST (Bailey T L, Gribskov M, Methods and statistics for combining motif match scores. J Comput Biol 5, 211 (1998)). Each feature represents the number of occurrences of a given binding site per base pair of sequence.

[0163] Preliminary feature selection. We used the F-score as preliminary screening to remove redundant and irrelevant features:

$$Fscore = \frac{{( {\overline{x}}_{i}^{( + )} - {\overline{x}}_{i} )}^{2} + {( {\overline{x}}_{i}^{( - )} - {\overline{x}}_{i} )}^{2}}{\frac{1}{{n}^{( + )} - 1} {\sum }_{k = i}^{{n}^{+}} {( {x}_{k , i}^{( + )} - {\overline{x}}_{i}^{( + )} )}^{2} + \frac{1}{{n}^{( - )} - 1} {\sum }_{k = i}^{{n}^{-}} {( {x}_{k , i}^{( - )} - {\overline{x}}_{i}^{( - )} )}^{2}}$$

where x̅ᵢ, x̅ᵢ⁽⁺⁾, and x̅ᵢ⁽⁻⁾ are the average of the ith binding site of the complete forebrain and control datasets, respectively; n⁽⁺⁾ is the number of forebrain enhancers and n⁽⁻⁾ is the number of controls; x̅_{k,i}⁽⁺⁾ is the ith binding site of the kth forebrain enhancer, and x̅_{k,i}⁽⁻⁾ is the ith binding site of the kth control instance. Only the top 100 features ranked by the F-score were employed in the subsequent analysis.

[0164] Random forest classifier. A random forest (RF) trains a set of decision trees on subsets of features. Each tree in the forest assigns a class to each of the enhancers. The final classification of a given enhancer is decided by a simple majority vote. In the construction of the decision tree, a subset of n out of the total N features are randomly selected at each split, and the feature with maximum information gain out of the n is used to split the node. We constructed a RF with 500 decision trees, and randomly selected 10 out of the total 100 features to split the nodes. We used the RF implementation from the ‘randomForest’ R package (Liaw A, Wiener M, Classification and Regression by randomForest. R News 2, 18 (2002)). A visualization of the RF model to distinguish among 1. pallium only, 2. both pallium and subpallium, and 3. subpallium only enhancers, as well as random genomic sequences with matching length and GC content is shown in FIG. 5. For simplicity, we have omitted the proportion of trees in the RF that assign the enhancers to class 2, except for those enhancers that show activity in both pallium and subpallium.

[0165] During the construction of a RF, the out-of-bag (OOB) data, approximately one-third of the enhancers, are then used to estimate the prediction accuracy. Small classification errors would indicate classes of enhancers with strong tissue-specific signatures (Narlikar L, Sakabe N J, Blanski A A, Arimura F E, Westlund J M et al., Genome-wide discovery of human heart enhancers. Genome Res 20, 381 (2010)). The OOB estimate of the error rate for this model is 23.65%. The model performs reasonably well for each individual class (Table 9).

[0166] The false positive rate (FPR) computed for enhancers active in pallium only, pallium and subpallium, and subpallium only with respect to random controls are 0.09, 0.03, and 0.08, respectively.

[0167] Extraction of relevant motifs. To assess the importance of a motif, we first randomly interchanged its frequencies of occurrence among all test sequences, then computed the prediction accuracy, and finally compared this value with the accuracy obtained for the original, unaltered sequences.

[0168] A critically important characteristic of RFs for this analysis is their ability to quantify which variables, in this case motifs, contribute most to the prediction accuracy and thus identify presumably biologically relevant motifs and their corresponding transcription factors. In the initial formulation, it was proposed to quantify the importance of a variable by verifying internal OOB prediction estimates using only selected variables (Breiman L, Random Forests. Machine Learning 45, 5 (2001)). To evaluate the importance of a given variable we first disrupt the association between the variable and the classifier response by randomly reshuffling the values of the variable across all forebrain enhancer sequences and then predict the response and measure the difference in the prediction accuracy before and after reshuffling the values of the variable. If the original variable was associated with the response, the prediction accuracy (i.e. the number of observations classified correctly) will decrease substantially.

[0169] We obtained a ranking of variable importance for each forebrain enhancer class. The 15 binding sites with highest impact in the prediction accuracy of the respective classifiers are shown in FIG. 7. Of note, some of the sequence motifs are predicted to be binding sites for transcription factors not expressed in the respective structure. For instance, Otx1 but not Otx2 is expressed in the pallium (Table 6). These apparent discrepancies likely result from the large numbers of related transcription factors with virtually indistinguishable binding sites, such as Otx1 and Otx2 (52). Therefore, many of the identified motif occurrences may represent in vivo binding sites for different, closely related transcription factors.

[0170] Conservation of relevant motifs. We hypothesized that if the predictive binding sites reflect actual transcription factor binding sites, they would tend to be preferentially located within these evolutionarily conserved localized regions. To test this systematically, we examined the correlation between the average 17-way phastCons conservation score (Siepel A, Bejerano G, Pedersen J S, Hinrichs A S, Hou M et al., Evolutionarily conserved elements in vertebrate, insect, worm, and yeast genomes. Genome Res 15, 1034 (2005)) of each binding site and the binding site importance, as determined by the RF algorithm. The average conservation score of each binding site was computed over all forebrain enhancer sequences containing at least one instance of the binding site. Also, for each forebrain enhancer sequence, only the binding site instance with the highest conservation score was considered for the average.

[0171] Indeed, for all classes of forebrain enhancers we observed that important binding sites identified by the RF algorithm (with a mean decrease in accuracy greater than the median value over all binding sites) are significantly more conserved than non-important binding sites (FIG. 5; P-values 2.0×10⁻¹³, 2.5×10⁻⁹, 1.1×10⁻⁶, and 2.2×10⁻¹⁶, for pallium, subpallium, pallium and subpallium, and the complete forebrain dataset, respectively, Wilcoxon Rank-Sum Test).

[0172] Relevant motifs and tissue-specificity. To determine and compare the density of putative binding sites among the different classes of forebrain enhancers we computed the over- or under-representation of binding sites as compared with randomly sampled genomic background (FIG. 8). Only binding sites among the 30 most relevant for each of the three enhancer classes considered were selected, with a total of 70. Our analysis showed that 38 (54%) of the most relevant binding sites were overrepresented in all forebrain enhancer classes. We used the Z-score to visualize the results as a heat map where rows are binding sites in TRANSFAC and JASPAR and columns correspond to pallium, subpallium, and pallium/subpallium enhancers. Binding sites were subjected to hierarchical clustering using the Euclidean distance measure with average linkage; enhancer classes were clustered using the Spearman correlation and average linkage.

[0173] Predicted distribution of pallium and subpallium enhancers. To investigate the distribution of pallium and subpallium enhancers in our telencephalon enhancer dataset, we applied the trained RF classifier with very strict cut-off parameters (FDR=5%) to 4,425 p300 ChIP-seq based telencephalon enhancer predictions. Over 1,855 enhancers were assigned to one of the 3 telencephalon classes at this level of stringency. From this set, 80% were predicted to be active in both pallium and subpallium, 9% active in pallium only, and 11% specific to subpallium.

TABLE 9
Confusion matrix for the RF classifier.

| | | classified as | | | |
|---|---|---|---|---|---|
| | | | pallium and | sub- | genomic |
| | | pallium | subpallium | pallium | background |
| true | pallium | 19 | 4 | 14 | 9 |
| class | pallium and sub- | 1 | 12 | 0 | 5 |
| | pallium | | | | |
| | subpallium | 10 | 4 | 14 | 16 |
| | genomic | 98 | 31 | 89 | 862 |
| | background | | | | |

The matrix shows how many enhancers active in pallium only, pallium and subpallium, and subpallium, as well as randomly selected (genomic background) sequences (rows) are classified in one of these possible four classes (columns). The numbers denote total numbers of classified sequences.

### Example 2

### Generating Neuron Progenitors Using MGE Enhancers

[0174] The medial ganglionic eminence (MGE) is an embryonic structure that generates the majority of cortical interneurons. MGE transplantation into the postnatal CNS modifies circuit function and improves deficits in mouse models of epilepsy, Parkinson's disease and psychosis. Herein, we describe approaches to generate mouse MGE progenitor cells from primary dissociated MGE cells as well as from embryonic stem (ES) cells. Using a modified embryoid body method for mouse ES cells, we provided gene expression evidence that ES-derived Lhx6⁺ cells closely resemble immature interneurons generated from authentic MGE-derived Lhx6⁺ cells. We also demonstrate the utility of enhancer elements [422 (DlxI12b), Lhx6, 692, 1056, and 1538] as tools to mark MGE-like cells in ES differentiation experiments. We found that enhancers DlxI12b, 692, and 1538 are active in MGE-like cortical interneuron progenitors while enhancer 1056 is active only in oligodendrocyte (Olig2⁺) progenitors. These data demonstrate unique techniques to follow and purify GABAergic cortical interneurons and oligodendrocytes for use in stem cell-based therapeutic assays and treatments.

[0175] MGE enhancer constructs and cultures were made as described herein.

[0176] MGE Primary Culture.

[0177] E12.5 or E13.5 MGE from transgenic mouse brains were dissected and dissociated into single cells with 0.05% Trypsin with 10 μg/ml DNase I at 37° C. for 15 min. Defined proliferating media (Walton et al., 2006) included DMEM/F-12 glutamax (Invitrogen) with 5% FBS (Hyclone Defined Serum), 1×N2 (Invitrogen), 1× Pen/Strep (Cell Culture Facility at UCSF), 35 μg/ml bovine pituitary gland extract (Invitrogen), 20 ng/ml human bFGF (Peprotech) and 20 ng/ml human EGF (Peprotech). For differentiation media, serum, pituitary gland extracts and both growth factors were removed. For the serum free media, RHB-basal media (Stem Cell Sciences) was supplemented with 1×N2 (Millipore), 10 ng/ml EGF, 100 ng/ml FGF-8 (Peprotech), 5 ng/ml WNT-3a (R&D System) and 250 ng/ml Sonic hedgehog N-terminus (Shh-N) (R&D System). Cells could only be grown on laminin-treated culture plates with the serum free media. With all 4 growth factors combined, MGE cells continued to proliferate in vitro for up to 10 passages that last 7 weeks.

[0178] ES cells maintenance and differentiation. Mouse Foxg1::venus (Eiraku et al., 2008) and E14 ES cells maintenance medium was GMEM medium supplemented with 10% Knock Out Serum Replacement (KSR) (Invitrogen), 1% FBS (Hyclone, Define Serum), 1 mM sodium pyruvate, 0.1 mM MEM nonessential amino acids (NEAA), 0.1 mM 2-ME (2-mercaptoethanol, freshly prepared each time). For J14 cells (Maroof et al., 2010), maintenance medium was Knockout DMEM (Invitrogen) supplemented with 15% FBS, 2 mM glutamate, 0.1 mM NEAA, 1× Pen/Strep, 0.1 mM 2-ME. In all ES cells, 2000 U/ml Leukaemic Inhibitory Factor (LIF, Millipore) was added freshly every other day. For feeder cells (SNL and SNLB, see below) media: DMEM with 10% FBS with glutamate and 1× Pen/Strep. For all ES cell differentiation media: GMEM medium supplemented with 10% KSR, 1 mM sodium pyruvate, 0.1 mM NEAA, 0.1 mM 2-ME. It is important to note that different lots of KSR produced different percentage of Lhx6-GFP⁺ cells (and Foxg1::venus⁺ cells) and therefore required testing for differentiation media. For SFEBq culture (modified from the study by Danjo et al. 2010), ESCs were dissociated to single cells in 0.25% trypsin-EDTA and quickly re-aggregated in the differentiation medium containing 100 ng/ml Dkk-1 (5000 cells/100 μl/well) using 96-well low cell adhesion plates (Lipidure-coat plate A-U96 from NOF America). On day 3 of differentiation (D3), 20 ul of differentiation media containing SAG (Alexis Biochemicals) was added into each well so that the final concentration for SAG is 6 nM. On D6, ES cell aggregates (embryoid body (EB) aggregates) were transferred to a 10 cm bacterial-grade dish with DMEM/F12 supplemented with N2 and 6 nM SAG.

[0179] Immunohistochemistry.

[0180] ES EB aggregates at various time points of differentiation were collected and fixed with 4% paraformaldehyde, then cryoprotected with 15% sucrose overnight before embedding in OCT media. Each aggregate was sectioned into 30×10 μm sections for immunofluorescent analyses. For antibody staining, glass slides with sections were washed with PBS three times and permeabilized with 0.3% Triton X-100 before blocking with 2% skim milk (Difco). Primary antibodies were guinea pig anti-β-Gal (1:500, kindly provided by Thomas Finger, University of Colorado) (Yee et al., 2003), chicken anti-GFP (1:500, Ayes Labs), rabbit anti-Ds-Red (mCherry) (1:500, Clontech), rat anti-Ds-Red (1:500, ChromoTeK), mouse anti-Nkx2-1 (1:200, Leica microsystems), rabbit anti-Nkx2-1 (1:200, Santa Cruz Biotechnology, Inc.), guinea pig anti-Dlx2 (1:2000, kindly provided by Kazuaki Yoshikawa, Osaka University, Osaka, Japan) ((Kuwajima et al., 2006), rabbit anti-Foxg1 (1:2000 (Watanabe et al., 2005)), mouse anti-Islet1 (1:250, IOWA Hybridoma Bank), mouse anti-human Ki67 (1:200, BD Pharmingen), rabbit anti-Tbr1 (1:1000, Millipore), rabbit anti-Olig2 (1:500, Millipore), mouse anti-Mash1 (1:500, BD Pharmingen), rabbit anti-GABA (1:1000, Sigma), rabbit anti-Calbindin (1:2000, Swant), rabbit anti-Mafb (1:1000, Bethyl Laboratories), rabbit anti-PV (1:2000, Swant), rat anti-Sst (1:250, Millipore), goat anti-Sst (1:200, Santa Cruz Biotechnology, Inc.), rabbit anti-NPY (1:250, ImmunoStar), mouse anti-β-III-Tubulin (TUBIII) (1:1000, TUJ1, Covance), Alexa 488 and Alexa 594 secondary antibodies (1:500, Invitrogen) were used accordingly to the primary antibody species. Sections were counterstained with 4′,6-diamidino-2-phenylindole (DAPI, 5 ng/ml, Invitrogen).

[0181] Image analyses. For co-localization of various markers with Lhx6-GFP⁺, DlxI12b-βg-mCherry⁺ and 692-mCherry⁺ (692-βg-mCherry⁺) cells we wrote a macro for cell counting of each channel (red and green channels) and of the co-localized channel in image J. The threshold was set 81-255 for green channel, and 69-255 for red channel; then it run “convert to mask” “watershed” “analyze particle size=15-200 circularity=0.20-1.00” for each channel and for the co-localized channel (created by “colocalization”, “channel1=red; channel2=green, ratio=50, threshold channel 1=50, threshold channel 2=50, display=255, co-localized”).

[0182] For co-localization of 692-mCherry⁺, 692-βg-mCherry⁺ cells with Lhx6-GFP⁺, we manually counted cells from images taken from immunofluorescent staining (the data was comparable to that done by image J analyses but included more in depth analyses). GFP⁺ and mCherry⁺ cells were counted according to its expression level as bright cells or dim cells (there were 3-10 times more of dim mCherry⁺ cells than bright mCherry⁺ cells, whereas there were usually 2-3 times more of bright GFP+ cells than dim GFP+ cells). The percentage of co-localization in the result sections considered all cells. From one of the clones from each construct (J6M1 and J6βM31) we also calculated the percentage of co-localization among bright GFP⁺ and mCherry⁺ cells. In summary, 92.94%±9.85% of 692-mCherry⁺ cells are Lhx6-GFP⁺; 88.09%±4.7% of 692-βg-mCherry⁺ cells are Lhx6-GFP⁺; among Lhx6-GFP⁺ cells, 35.44%±9.22% are 692-mCherry⁺ and 31.05%±3.59% are 692-βg-mCherry⁺.

[0183] For co-localization of 1538-βg-mCherry⁺ cells with Lhx6-GFP⁺, we also manually counted cells from 6 images taken from immunofluorescent staining on D14.

[0184] Transplantation.

[0185] On D12 of differentiation, ES EB aggregates from 20 96-wells plates were collected (1920 aggregates) and dissociated with the enzyme solution of the Neural Tissue Dissociation Kit (Sumitomo Bakelite, MB-X9901) (Danjo et al., 2011). Rock inhibitor Y-27632 (10 nM) was added in all the solutions to prevent cell death. Cells were stained with Sytox Blue (Invitrogen, to eliminate dead cells) in 1% BSA/HBSS 30 minutes before sorting to distinguish dead vs. live cells. Lhx6-GFP⁺ cells were sorted with BD FACSAria II using 100 μm nozzle and collected in 10% FBS/DMEM/F-12. Fifty to one hundred thousand sorted Lhx6-GFP⁺ cells were delivered into P0-P2 neonatal mouse cortices (anesthetized on ice for 3 min). Depth of injection: ˜1 mm from the surface of skull, three transplantation sites each hemisphere. The pups were revived by on a 37° C. warm plate before being returned to the litter. Transplanted mice (4 days, 1 or 2 months after transplantation) were perfused transcardially with 4% paraformaldehyde, and 50 μm-thick brain sections were obtained for immunostaining.

[0186] RNA Microarray Analyses.

[0187] RNA was isolated from fluorescent activated cell sorting (FACS) purified ES-Lhx6-GFP⁺ (two batches, 466K and 220K cells), ES-Lhx6-GFP⁻ (158K cells), and MGE-Lhx6-GFP⁺ (551K) cells using RNeasy Micro kit (QIAGEN) according manufacturer's instructions. The procedure of EB aggregates dissociation, FACS purification and collection of cells were the same as described above for cell transplantation. For E12.5 MGE, cells were dissociated as described in MGE primary culture. Purified total RNA was submitted to the Genomic Core at UCSF arrays.ucsf.edu website), for quality assessment using a Pico Chip on an Agilent 2100 Bioanalyzer (Agilent Technologies). Total RNA was amplified using the Sigma whole transcriptome amplification kits following the manufacturer's protocol (Sigma) and Cy3-CTP labeled with NimbleGen one-color labeling kits (Roche-NimbleGen Inc). Equal amounts of Cy3 labeled target were hybridized to Agilent whole mouse genome 8×60K Ink-jet arrays. The data was extracted with Feature Extraction v10.1 software.

[0188] Genome Coordinates of Enhancers.

[0189] Enhancer 422 is located between Dlx1 and Dlx2 genes (human: chr2:172,955,879-172,957,052; corresponding to mouse: chr2:71,373,435-71,374,614), and encompasses the Dlx1 and Dlx2 intragenic enhancer, DlxI12b, (mouse: chr2:71,374,047-71,374,552) (Ghanem et al., 2007; Potter et al., 2009). Enhancer 692 is located on human chromosome 11 (chr11:15,587,041-15,588,314) near Sox6. Enhancer 1056 is on human chromosome 18 (human coordinates: chr18:76,481,720-76,483,257) near Sall3. Enhancer 1538 is on human chromosome 14 (ch14: 36,911,211-36,914,360) near Nkx2-1. The 2.1 kb mouse Lhx6 enhancer with proximal promoter was described by Du et al., NKX2.1 specifies cortical interneuron fate by activating Lhx6, Development 135:1559-1567, 2008.

[0190] Transgenic Mouse Enhancer Assay.

[0191] Enhancer candidates were amplified by PCR from human genomic DNA (Clontech) and cloned into the Hsp68 promoter-β-galactosidase reporter vector as previously described (Blow et al., ChIP-Seq identification of weakly conserved heart enhancers. Nat Genet. 42:806-810, 2010). Trans genic mouse embryos were generated by pronuclear injection and F0 embryos were collected at E11.5 and stained for β-galactosidase activity with 5-bromo-4-chloro-3-indolyl β-D-galactopyranoside (X-Gal). Only patterns that were observed in at least three different embryos resulting from independent transgenic integration events of the same construct were considered reproducible. For detailed section analyses, embryos collected at E11.5 were fixed in 4% paraformaldehyde and stained with X-Gal overnight. X-Gal-stained embryos were then embedded in paraffin using standard methods. Coronal sections of the head were cut using standard methods, counterstained with Eosin for visualization of LacZ-negative embryonic structures and photographed.

[0192] Lentiviral Vector Generation.

[0193] The DlxI12b DNA fragment was PCR amplified from the DlxI12b-βglobin-Cre vector (Potter et al., 2009) with introduced 5′ BamHI and 3′ AgeI sites in the primers: (forward: 5′-CTCTGGATCCACACAGCTTAATGATTATC-3′ (SEQ ID NO:148), reverse: 5′-GAGAACCGGTGCAGGAATTCATCGATGATA-3′ (SEQ ID NO:149)). The 692, 1056 and 1538 DNA fragments were PCR amplified from human genomic DNA (Roche) with introduced 5′ BamHI and 3′ AgeI sites in the primers: (692 forward: 5′-ACAAGGATCCCACATCTCAGTGGCTCAT-3′ (SEQ ID NO:150), reverse: 5′-TCTAACCGGTCAGGGTGTCTGTGTTGATG-3′ (SEQ ID NO:151)), (1056 forward: 5′-GACAGGATCCGTCCCTCACAGAACTCAG-3′ (SEQ ID NO:152), reverse: 5′-GACAACCGGTGATGCCTGCCTTGAAGTC-3′ (SEQ ID NO:153)), (1538 forward: 5′-TCTAGGATCCTGCTGCCTCAAACAAGAATG-3′ (SEQ ID NO:154), reverse: 5′-AGTTACCGGTTTGGATGAGGGAAAGACCTG-3′ (SEQ ID NO:155)). Digested DNA fragments of enhancers were cloned into the BamHI and AgeI sites of the pLenti-mcs-mCherry_Rex1-Blasticidin^{r} vector (Kita-Matsuo et al., 2009). The β-globin minimal promoter (template: DlxI12b-β-globin-Cre) and the hsp68 minimal promoter (Kothary et al., 1988) were PCR amplified with the following primers: (β-globin forward: 5′-CTATACCGGTAGCCCGGGCTGGGCATAA-3′ (SEQ ID NO:156), reverse: 5′-GAGAACCGGTCGCCGCGCTCTGCTTCTGG-3′ (SEQ ID NO:157)), (hsp68 forward: 5′-GAGAACCGGTGCATCGGCGCGCCGACC-3′ (SEQ ID NO:158), reverse: 5′-ATATTCCGGAGGCGCCGCGCTCTGCTTC-3′ (SEQ ID NO:159)). The minimal promoters were inserted into the AgeI site that preceded the mCherry gene. The Dlx-I12b-β-globin fragment was PCR amplified directly from (Potter et al., 2009), using the Dlx-I12b forward and β-globin reverse primers described above. All PCR fragments and lentiviral constructs were verified by restriction enzyme digests and DNA sequencing.

[0194] Lentivirus Production.

[0195] HEK293T cells grown in DMEM with 10% FBS were transfected using Fugene 6 transfection reagent (Roche) with four plasmids to generate lentivirus particles. Plasmids used for a 10 cm tissue culture plate of HEK293T cells (at about 50-70% confluence): 6.4 ug of Lentiviral vector DNA, with 1.2 ug each of 3 helper plasmids (pVSV-g, pRSVr and pMDLg-pRRE). Media was completely replaced 4 hours after transfection, and cells were grown for four days before harvesting. On day four of culture, all the media was collected and filtered through a 0.45 low protein binding membrane to remove cells and large debris. Filtered media was either aliquoted then stored at −80° C. (unconcentrated), or pooled and ultracentrifuged at 100,000×g for 2.5 hours at 4° C. The concentrated viral pellet was resuspended overnight in sterile PBS (adding 50 ul of PBS to the pellet for each 10 cm plate used), then stored at −80° C.

[0196] Transient Lentiviral Infection.

[0197] E13.5 MGE from wild type mouse brains were dissected and dissociated into single cells as described above. For differentiated ES cells, D11 aggregates were collected and dissociated with 0.05% Trypsin with 10 μg/ml DNase I for 20 min. Twenty thousand primary or ES cells were incubated with each of the lentiviruses for one hour in a 1.5 ml microcentrifuge tube at 37° C. water bath, and then cells were seeded in poly-L-lysine/laminin coated 16-well slide chambers overnight in the DMEM media (10% FBS) with the viruses. The next day, viral-containing media was removed and new media added. For MGE primary cells, the defined proliferation media was added; for differentiated ES cells, DMEM/F-12 with N2 supplement was added. Three days after infection, cells were washed and fixed with 4% paraformaldehyde before immunostaining.

[0198] Generation of Lentivirus-Transduced ES Cell Clones.

[0199] To generate ES cell clones containing lentiviral constructs, proliferating cells (E14 or J14) were dissociated and 400,000 cells were incubated with concentrated virus in a 1.5-ml microcentrifuge tube at 37° C. for 1 hour (mixing every 15 minutes). Then the virus/cells were transferred to ES maintenance media with LIF overnight (for E14, cells were seeded in gelatin coated plates alone; for J14, cells were seeded onto mitomycin C-treated SNLB feeder cells (see below)). The next day, the supernatant/virus was removed and fresh media with LIF was supplied for another day before adding Blasticidin (20 ug/ml for E14 cells and 4 ug/ml for J14) for 1 week of selection (changing media daily or every other day depending on cell density). Individual colonies emerged ˜1 week after virus infection and were picked up by blunt 10 μl tips, then trypsinized into one well of a 96-well plates. Each clone was expanded and frozen down for further analyses. To establish blasticidin-resistant feeder cells, SNLB, an STO cell line (SNL76/7, a kind gift from Louis Reichardt, University of California, San Francisco, Calif.) that expresses Neomycin resistance gene and LIF gene, was transfected with pcDNA6/V5-His ABC plasmid (Invitrogen, empty vector with Blasticidin resistance gene driven by EM7). Mixed colonies of blasticidin resistance SNLB cells were expanded for frozen aliquots, or treated with mitomycin C for J14 enhancer cell line selection and maintenance.

[0200] Using Embryonic Tissue to Generate Cortical Interneuron Precursors.

[0201] We initially attempted to expand MGE progenitors directly from dissociated embryonic mouse MGE tissue. Because previous studies had been successful in expanding neural stem cells in serum-free or serum-containing media with the addition of epidermal growth factor (EGF) and basic fibroblast growth factor (bFGF, or FGF-2) (Conti et al., Niche-independent symmetrical self-renewal of a mammalian tissue stem cell. PLoS biology 3:e2832005; Walton et al., Microglia instruct subventricular zone neurogenesis. Glia 54:815-825, 2006), we tested several different protocols for MGE cells. We used MGE cells dissociated from E12.5/E13.5 transgenic embryos that expressed β-Galactosidase (β-Gal) or GFP in postmitotic MGE neurons, including immature cortical interneurons, under the control of a zebrafish Dlx5/6 enhancer or a mouse Lhx6-GFP BAC transgene (Stuhmer et al., Expression from a Dlx gene enhancer marks adult mouse cortical GABAergic neurons. Cereb Cortex 12:75-85, 2002; Gong et al., A gene expression atlas of the central nervous system based on bacterial artificial chromosomes. Nature 425:917-925, 2003; Cobos et al., Cellular patterns of transcription factor expression in developing cortical interneurons. Cereb Cortex 16 Suppl 1:182-88, 2006).

[0202] We first used the serum containing media (proliferation media) (Walton et al., Microglia instruct subventricular zone neurogenesis. Glia 54:815-825, 2006) to culture dissociated MGE ventricular zone (VZ) and subventricular zone (SVZ) cells from Dlx5/6-βgal mice. In the serum containing media MGE cells continued to proliferate in vitro for ˜3 weeks (5 passages). Removing growth factors and serum from the media (differentiation media) promotes neural differentiation (Walton et al., Microglia instruct subventricular zone neurogenesis. Glia 54:815-825, 2006), and in our hands resulted in a significant increase of β-Gal⁺, GAD67⁺, Dlx2⁺ and Tuj1⁺ cells in MGE culture after 4 days of differentiation (FIG. 1A-D″). Both GAD67 and Dlx2 expression mark forebrain GABAergic cells; similarly, β-Gal expression, driven by Dlx5/6 enhancer, is expressed by basal ganglionic GABAergic progenitors and neurons. Tuj1 is a pan-neuronal marker. Therefore, this protocol can generate forebrain GABAergic neurons. To test whether these cells maintain MGE identity we followed the expression of Lhx6.

[0203] Using MGE cells from Lhx6-GFP transgenic mice, we found that Lhx6-GFP⁺ cells were present for 3-7 days in vitro, and formed clusters or aggregates (30-50% of the cells are Lhx6-GFP⁺) in the adherent culture in the proliferation media (FIG. 11E-F). Prolonged culture (more than 10 days in vitro), or passage of cells (even with just one or two passages) resulted in a marked decrease in Lhx6-GFP⁺ cells (FIG. 11G-H). Despite the increase of GABAergic neurons generated in the differentiation protocol, we found that numbers of Lhx6-GFP⁺ cells went down (FIG. 11I-K), suggesting that this protocol was not effective at producing stable pools of MGE-type cortical interneurons.

[0204] Next, we attempted to maintain MGE identity using growth factors implicated in basal ganglia development (EGF, FGF-8, WNT-3a and Sonic hedgehog, individually and in combination) in a serum free media. However, this approach also failed to maintain Nkx2-1 and Lhx6-GFP expression, even after 1 passage (data not shown). Thus, we were unable to expand or maintain the identity of embryonic MGE cells in vitro, and concentrated on using ES cells to generate MGE-like neurons.

[0205] Using embryonic stem cells to generate cortical interneuron precursors. Embryonic stem (ES) cells, grown feeder-free or on feeder cells, can be expanded and differentiated into forebrain progenitors and neurons. The serum-free, floating culture of embryoid body-like aggregates (‘SFEB’) method is an efficient approach for converting ES cells into neural stem cells (Watanabe et al., 2005). In particular, addition of two growth factor inhibitors, the anti-Wnt reagent Dickkopf-1 (Dkk-1) and the anti-Nodal reagent Lefty-A (or SB431542), during the early time points of differentiation efficiently made Foxg1⁺ telencephalic neural stem cells (Watanabe et al., 2005; Eiraku et al., 2008). An improved SFEBq method using low cell-adhesion U-shape 96-well plates facilitates the aggregation of mouse ES cells after dissociation, generating aggregates of uniform size during differentiation and with higher efficiency of producing Foxg1⁺ cells (Eiraku et al., 2008). To convert neural stem cells into ventral telencephalic cells, Shh (or SAG, an Shh agonist) was added on days 3 and 6 (D3 and D6) after differentiation (Danjo et al., 2011).

[0206] We used the SFEBq method (FIG. 12A) to generate MGE progenitor-like cells with three mouse ES cell lines: Foxg1::venus (Danjo et al., 2011), E14 (the parental cell line for Foxg1::venus) and J14 (Lhx6-GFP transgenic line) (Maroof et al., 2010). We optimized concentrations of Dkk-1, Shh, SAG, and other growth factors for MGE-like cell production based on Nkx2-1, Lhx6-GFP, and/or Foxg1 expression (data not shown). We found that a modification of Danjo et al., 2011 was the best procedure (adding 100 ng/ml Dkk-1 on D0 and 6 nM SAG on D3 and D6 of differentiation; FIG. 12A), and that SAG was more efficient and reproducible than recombinant Shh-N at generating Nkx2-1⁺ cells (data not shown); the efficiency of our current protocol for induction of Lhx6-GFP expression at D15 was ˜2-fold greater than that using the protocol of Danjo et al., 2011. Furthermore, Nkx2-1⁺ induction was most efficient from the E14 cell line among the three cell lines tested (FIG. 1 2B-F′ and data not shown).

[0207] At D9, the E14 cells expressed markers of MGE and POA VZ and SVZ progenitors (Nkx2-1, Mash1, and Islet 1; FIGS. 2B&C); by D15, there was a reduction of Nkx2-1 expression, and almost no Mash1 and Islet1 expression (FIGS. 12B′&C′), suggesting a reduction in MGE and POA-type progenitors. On the other hand, between D9-D15, there was an increase in cells expressing GABA and Calbindin, markers of MGE and POA-type neurons (FIG. 12D-E″). To obtain better evidence for MGE neuronal differentiation we needed more specific markers for this cell type, and therefore turned to the J14 ES cell line.

[0208] MGE progenitor cells give rise to Lhx6⁺ cortical interneurons, striatal interneurons, and globus pallidus neurons (Marin et al., 2000; Anderson et al., 2001; Flandin et al., 2010). To examine if Lhx6 expressed in our MGE differentiation protocol, we studied GFP expression in J14 cells (Lhx6-GFP transgenic line). Using the SFEBq method, we found that Lhx6-GFP⁺ cells began to emerge on D9-10, when there was robust induction of Nkx2-1 expression (FIG. 13A-A″). The number of Lhx6-GFP⁺ cells peaked on D12-13 (FIG. 13B′) with a slight decline on D15-16 (FIG. 13D′). By contrast, the number of Nkx2-1⁺ cells peaked on D9-D10 and gradually decreased from D12 to D16 (FIG. 13A-D). We measured the fraction of Nkx2-1⁺ cells that expressed Lhx6-GFP with immunofluorescence analysis. On D10, about 50% of Nkx2-1⁺ cells were Lhx6-GFP⁺ (mean±SEM: 48.9±3.8%, n=3), whereas 70% of Lhx6-GFP⁺ cells were Nkx2-1⁺ (72.1±15.0%). On D12, 75% of Nkx2-1⁺ cells were Lhx6-GFP⁺ (75.3±12.9%), and 63% of Lhx6-GFP⁺ cells were Nkx2-1⁺ (62.9±6.0%, n=3). By D14 and D16, the percentage of Nkx2-1 and Lhx6-GFP co-expression decreased; only 43.3±1.9% and 42.8±5.2% of Nkx2-1⁺ cells were Lhx6-GFP⁺, and 34.7±1.8% and 47.3±13.8% of Lhx6-GFP⁺ cells were Nkx2-1⁺ on D14 and D16 respectively (n=3). Therefore, using an optimized SFEBq method, J14 and E14 ES cells can be differentiated into MGE-like Nkx2-1⁺ progenitors and Lhx6-GFP⁺ neurons. To further define the molecular properties of the Lhx6-GFP⁺ cells, we used gene expression array analysis.

[0209] Comparing RNA Expression Profiles Between Lhx6-GFP⁺ Cells and Lhx6-GFP⁻ Cells Generated from Mouse J14 ES Cells.

[0210] We used RNA expression array analysis to investigate molecular properties of Lhx6-GFP⁺ cells generated from J14 cells at D12 of the MGE differentiation protocol. Lhx6-GFP⁺ cells and Lhx6-GFP⁻ cells (both from D12 EB aggregates) were isolated by fluorescent activated cell sorting (FACS) and were subjected to RNA expression microarray analyses (Table 7). Compared to Lhx6-GFP⁻ cells (ES Lhx6-GFP⁻), the Lhx6-GFP⁺ cells (ES Lhx6-GFP⁺) had lower expression of neural progenitor markers such as the HES genes (HESS in Table 1 and data not shown), suggesting that the Lhx6-GFP⁻ cells were in a more proliferative state. Proliferation marker Mki67 (an antigen recognized by monoclonal antibody Ki67) was lower in expression in Lhx6-GFP⁺ cells (data not shown). Subpallial-specific genes Dlx1, Dlx2, D1×5, Dlx6, GAD1 (GAD67) and GAD2 (GAD65) were present in higher levels in the Lhx6-GFP⁺ cells, consistent with its ventral telencephalic identity (Table 1 and data not shown). There were also higher levels of (mRNA) Nkx2-1, Lhx6, Lhx8 and Sox6 expression (Table 1), consistent with MGE identity. Markers of migrating immature interneurons such as ErbB4, MafB, NPAS1, Sst (Somatostatin) (Table 7), NPY (Neuropeptide 1′) and Calb1 (Calbindin) (data not shown) were also expressed at higher levels in the Lhx6-GFP⁺ cells. By contrast, genes expressed in oligodendrocytes, such as Olig2 and Sox10, were expressed higher in the Lhx6-GFP⁻ cells (Table 7 and data not shown). There was also higher expression of pallial markers (Pax6, Tbr1 and Neurod1) and LGE (striatal) markers (Ebf1 and FoxP1) in the Lhx6-GFP⁻ cells (Table 1 and data not shown).

[0211] We also examined hypothalamic and retinal marker expression in our microarray analyses. Rax expression is higher in the ES-Lhx6-GFP⁺ cells than in the ES-Lhx6-GFP⁻ cells (Table 7), suggesting that some of these cells may have either hypothalamic or retinal properties as Rax (Rx) is essential for early retinal and hypothalamic development (Mathers et al., 1997; Wataya et al., 2008; Medina-Martinez et al., 2009). On the other hand, Nkx2-2 expression is lower in the ES Lhx6GFP⁺ cells compared to the ES Lhx6-GFP⁻ cells (Table 10). Nkx2-2 is a marker of the hypothalamus and not the early retina (Shimamura et al., 1995; Kurrasch et al., 2007), although at mature stages it is expressed in retinal glia (Fischer et al., 2010). Finally, Otp expression is near background levels in all three samples (Table 10); Otp is a marker of the paraventricular nucleus analage (Bardet et al., 2008; Wataya et al., 2008). As Lhx6 is expressed in a small domain of the caudoventral hypothalamus (Allen Brain Atlas), it is possible that some of the ES Lhx6-GFP⁺ cells have differentiated towards a hypothalamic fate.

[0212] To confirm these data, we analyzed protein expression with immunostaining on aggregates collected 9-16 days after differentiation (D9-D16). Consistent with our microarray data, ˜50% of the Lhx6-GFP⁺ cells co-expressed Dlx2 and ˜75% of the Lhx6-GFP⁺ cells co-expressed Foxg1 at D12 (FIGS. 13E&F), few Lhx6-GFP⁺ cells expressed Islet1 (FIG. 13G), and none co-expressed Mki67, Tbr1, and Olig2 (FIG. 13H-J) on D11-D13 (and at other time points; data not shown). Thus the RNA expression array and immunostaining result provided strong evidence that Lhx6-GFP⁺ cells from J14 ES cells had properties of MGE-derived neurons. To further solidify this conclusion, we directly compared RNA expression of Lhx6-GFP⁺ J14 cells and Lhx6-GFP⁺ MGE cells.

[0213] Comparing RNA Expression Profiles Between Lhx6-GFP⁺ MGE Cells and ES-Derived Lhx6-GFP⁺ Cells.

[0214] To investigate how closely ES cells-derived Lhx6-GFP⁺ cells resembled authentic Lhx6⁺ MGE cells, we compared their gene expression profiles. We used FACS to purify GFP⁺ cells from the E12.5 MGE of Lhx6-GFP transgenic mice, and from J14 differentiated ES cells at D12 (see above). RNA was isolated from the cells and analyzed by gene expression array. We focused on the expression levels of genes with known regulatory functions and/or expression within the forebrain. We compared expression between the MGE Lhx6-GFP⁺ (MGE-GFP⁺) and J14 Lhx6-GFP⁺-(ES-GFP⁺) cells, and between MGE-GFP⁺ cells and J14 Lhx6-GFP⁻ (ES-GFP⁻) cells (Table 10 and data not shown). There was a remarkable similarity in the properties of the MGE-GFP⁺ and ES-GFP⁺ cells (genes shown in green indicated those genes that were expressed higher in both MGE-GFP⁺ and ES-GFP⁺ than in ES-GFP⁻). MGE-GFP⁺ and ES-GFP⁺ cells had relatively high expression (>10 arbitrary units) of MGE progenitor markers (Dlx1, Lhx6, Lhx8, Nkx2-1 and Sox6) and markers of immature MGE-derived pallial interneurons (ErbB4, GAD1, Lhx6, MafB, Sox6, and Sst). High levels of Coup-TFI (NR2F1) suggest that the cells have properties of the dorsal MGE and/or the caudal MGE and CGE.

[0215] While MGE-GFP⁺ and ES-GFP⁺ cells shared properties of the MGE and immature cortical interneurons, only the MGE-GFP⁺ showed robust expression of globus pallidus markers (Table 1 and data not shown), including Etv1 (ER81), Gbx2, Kctd12, Lhx8 and Zic1 (Flandin et al., 2010) (McKinsey, G., and Rubenstein, J L., unpublished observations). Furthermore, markers of the ventricular zone (Hes5), oligodendrocytes (Olig2 and Sox10), pallium (i.e. cortex; Pax6 and Neurod1), LGE/striatum (Ebf1) and hypothalamus (Nkx2-2) were expressed lower in both MGE-GFP⁺ and ES-GFP⁺ cells than in ES-GFP⁻ (shown highlighted in light gray in Table 10 and data not shown). Therefore, in vitro D12 differentiated J14-GFP⁺ expressed RNAs that are similar to those expressed in immature MGE-derived interneurons, and not MGE-derived projection neurons (i.e. globus pallidus) or other MGE-derived cells such as oligodendrocytes. Next we studied the properties of these cells in vivo.

[0216] Lhx6-GFP⁺ cells derived from mouse J14 ES cells became cortical interneurons after transplantation into mouse neonatal cortices. Our analyses indicated that our differentiation protocol generates MGE-type cells from J14 ES cells. Previous analyses of these cells showed that they can become cortical interneurons using a cell transplantation assay (Maroof et al., 2010). We confirmed this using our MGE-differentiation protocol of D12 Lhx6-GFP⁺ sorted cells. Four days after transplantation, about 20% of these Lhx6-GFP⁺ cells expressed markers of migrating cortical interneurons including GABA, Calbindin and MafB (data not shown). Thirty to sixty-nine days after transplantation, the Lhx6-GFP⁺ cells had a very low survival rate (˜1%), similar to a previous report (Maroof et al., 2010). Among Lhx6-GFP⁺ cells, 22% (mean±SEM: 22.38±5.01%, n=4) of them also expressed Parvalbumin; 58% (57.96±11.50%, n=3) of them expressed Somatostatin; and 16% (15.51±6.57%, n=4) of them co-expressed Neuropeptide Y (data not shown), results that are very similar to Maroof et al., 2010. Therefore, the Lhx6-GFP⁺ cells derived from J14 ES cells have properties of MGE cells based on gene expression data (previous sections) and have properties of cortical interneurons based on transplantation analysis (this section). In the next section we describe the use of J14 ES cells to study the activity of enhancers that are expressed in vivo in the MGE.

[0217] Generation of MGE-Like Cells In Vitro.

[0218] We were not successful in expanding MGE-type neurons in vitro from dissociated primary MGE cells (FIG. 11). While MGE cells became Dlx2⁺ GABAergic neurons, they lost Lhx6-GFP expression. Thus, studies are needed to identify the signaling system(s) that maintain Lhx6 expression in dissociated primary MGE cell cultures.

[0219] In contrast to primary MGE cultures, protocols for differentiating ES cells into MGE-like progenitors and neurons have been devised, including the SFEBq method (Watanabe et al., 2005; Maroof et al., 2010; Danjo et al., 2011; Goulburn et al., 2011). We used a modified SFEBq protocol to generate MGE-like progenitors and immature MGE-like interneurons from mouse ES cells. Our modified SFEBq MGE differentiation protocol improved the efficiency (about 2-fold increase) of inducing Lhx6-GFP⁺ cells compared to that of Danjo et al., 2011 (data not shown). We hypothesize that this improvement was because we did not dissociate the aggregates on D9 of differentiation, followed by FACS purification and reaggregation.

[0220] Our differentiation protocol generated progenitors and neurons with MGE-like molecular properties. At D12 clusters of cells within the aggregates expressed markers of immature MGE-derived neurons (Nkx2-1⁺/Lhx6⁺) (FIG. 13B″). However, many cells did not show expression of MGE markers, though they did not appear to be pallial cells as they lacked detectable Tbr1 and Pax6 expression (FIG. 13I and Table 10). Some Nkx2-1⁻/Lhx6⁻ regions may contain LGE/striatal cells as there was some Islet1 and CTIP2 expression (FIG. 3G and data not shown), although neither marker was LGE-specific. Olig2⁺ cells contributed to some of the Nkx2-1⁻/Lhx6-GFP⁻ cells (FIG. 13J), and probably correspond to immature oligodendrocytes. We are uncertain about the identity of the majority of the Nkx2-1⁻/Lhx6-GFP⁻ cells. Therefore, the MGE-differentiation protocol, while relatively specific for MGE specification, is not highly efficient.

[0221] The Nkx2-1⁺ MGE-like domains within the ES aggregates appeared around D8-9, similar to previous studies (Watanabe et al., 2005; Danjo et al., 2011). More than 50% of these Nkx2-1⁺ cells were proliferating at D9 based on Mki67 expression (data not shown). From D10 to D12, there was an increase of Nkx2-1⁺/Lhx6⁺ cells (FIG. 13A-B″); this expansion of the “MGE” clusters from D9-D13 suggested that Nkx2-1⁺ cells continued to divide. Later, the aggregates expressed makers of immature MGE-derived neurons (Lhx6, GABA and Calbindin;

[0222] FIG. 12E-F′ & 3D′). Furthermore, transplantation of FAC-sorted Lhx6-GFP⁺ cells generated neurons that expressed markers of MGE-derived interneurons (data not shown) as reported by Maroof et al., 2010.

[0223] Comprehensive gene expression analysis showed that the global RNA profile of ES-derived Lhx6-GFP⁺ cells (at D12 of differentiation) was quite similar to authentic E13.5 mouse Lhx6⁺ MGE cells. Furthermore, the RNA microarray profiles of both types of Lhx6-GFP⁺ sorted cells were similar to immature MGE-derived interneurons, and lacked prominent expression of markers of MGE-derived projection neurons (i.e. globus pallidus) or other MGE-derived cells such as oligodendrocytes.

[0224] Since the ES-derived Lhx6-GFP⁺ cells expressed Nkx2-1 and Lhx8 RNAs (Table 1), they probably correspond to cells that can differentiate into several lineages of MGE-derived neurons, including pallial and striatal interneurons and the globus pallidus neurons (Fragkouli et al., LIM homeodomain transcription factor-dependent specification of bipotential MGE progenitors into cholinergic and GABAergic striatal interneurons. Development 136:3841-3851, 2009; Flandin et al., The progenitor zone of the ventral medial ganglionic eminence requires Nkx2-1 to generate most of the globus pallidus but few neocortical interneurons. J Neurosci 30:2812-2823, 2010; Flandin et al., Lhx6 and Lhx8 coordinately induce neuronal expression of Shh that controls the generation of interneuron progenitors. Neuron 70:939-950, 2011). However, the gene expression array data showed lower expression of markers of globus pallidus neurons (e.g. ER81; Table 10; data not shown); therefore, we postulate that the ES-derived Lhx6-GFP⁺ cells are most similar to bi-potential immature interneurons. Furthermore, we suggest that these cells do not differentiate into subpallial cholinergic neurons because they have low expression of Islet1 and Gbx2 (Elshatory and Gan, The LIM-Homeobox gene Islet-1 is required for the development of restricted Forebrain cholinergic neurons. Journal of Neuroscience 28:3291-3297, 2008; Fragkouli et al., LIM homeodomain transcription factor-dependent specification of bipotential MGE progenitors into cholinergic and GABAergic striatal interneurons. Development 136:3841-3851, 2009; Chen et al., The mouse homeobox gene Gbx2 is required for the development of cholinergic interneurons in the striatum. The Journal of neuroscience: the official journal of the Society for Neuroscience 30:14824-14834, 2010) based on immunofluorescent (FIG. 3G) and gene expression array data (data not shown).

[0225] Finally, we found higher expression of MGE-derived cortical interneuron markers MafB and cMaf (McKinsey and Rubenstein, unpublished) in the Lhx6-GFP⁺ ES cells, providing evidence that this cell population has a bias towards pallial vs. striatal GABAergic interneurons.

[0226] We showed that ES-derived Lhx6-GFP⁺ cells transplantation into neonatal mouse produced cortical interneurons (data not shown). We did not test striatal transplantation, although we would expect that it would result in striatal interneurons, as found for MGE transplantation (Martinez-Cerdeno et al., Embryonic MGE precursor cells grafted into adult rat striatum integrate and ameliorate motor symptoms in 6-OHDA-lesioned rats. Cell Stem Cell 6:238-250, 2010). Future studies are needed to establish methods to promote pallial interneuron differentiation from these bi-potential progenitors. For instance, we have evidence that Zfhx1b transcription factor participates in the switch between pallial and striatal interneuron identity (McKinsey, G., and Rubenstein, J L., unpublished observations). Zfhx1b expression is expressed 3-fold higher in MGE-derived Lhx6-GFP⁺ cells than the ES-derived Lhx6-GFP⁺ cells (Table 1); perhaps increased Zfhx1b function would repress Nkx2-1 and Lhx8, and potentiate the differentiation of pallial interneurons.

### Example 3

### Enhancers Used to Enrich MGE-Derived Cells

[0227] Multiple small mouse enhancer elements that drive expression in mouse MGE cells have been identified. These include Dlx1 & Dlx2 (Dlx1/2) intergenic enhancer, Dlx5 & Dlx6 (Dlx5/6) intergenic enhancer, and Lhx6 promoter/enhancers (Zerucha et al., A highly conserved enhancer in the D1×5/Dlx6 intergenic region is the site of cross-regulatory interactions between Dlx genes in the embryonic forebrain. J Neurosci 20:709-721, 2000; Ghanem et al., Distinct cis-regulatory elements from the Dlx1/Dlx2 locus mark different progenitor cell populations in the ganglionic eminences and different subtypes of adult cortical interneurons. J Neurosci 27:5012-5022, 2007; Du et al., NKX2.1 specifies cortical interneuron fate by activating Lhx6. Development 135:1559-1567, 2008; Potter et al., Generation of Cre-transgenic mice using Dlx1/Dlx2 enhancers and their characterization in GABAergic interneurons. Mol Cell Neurosci 40:167-186, 2009). In addition, we have been characterizing novel human telencephalic enhancers, some of which drive expression in MGE cells (Visel, et al., unpublished data) (enhancer.lbl.gov website). Although none of the enhancers is entirely specific for MGE cells, they may be extremely useful in stem cell studies. Thus, we have explored their utility in identifying cell types using the MGE differentiation protocol of mouse E14 and J14 ES cells. We compared the enhancer activities with markers of MGE cell identity, including expression of Lhx6-GFP.

[0228] Here we focused on five enhancers (FIG. 14D, see Table 1 and 2 for genome coordinates). Enhancer 422 is located between human Dlx1 and Dlx2; it includes in its sequences the Dlx1/2 intragenic enhancer DlxI12b that drives expression in forebrain GABAergic neurons, including those derived from the MGE (Ghanem et al., 2007). Similar to the reported mouse enhancer DlxI12b activity (Potter et al., 2009), human enhancer 422 (driving β-Gal expression) was active in MGE subventricular zone (SVZ) and mantle zones (MZ), as well as in the LGE/striatum region of E11.5 transgenic mouse brains (FIG. 4A). Enhancer 692 is located on human chromosome 11 in the region (˜500 Kb away) of Sox6, a gene that is expressed in the MGE and its derived neurons. Enhancer 692 drove the β-Gal expression in VZ, SVZ, and MZ of MGE, as well as in migrating neurons of E11.5 transgenic embryonic brains (FIG. 14B). Enhancer 1056 was active only in the ventral part of the E11.5 MGE VZ and SVZ region (FIG. 14C). The nearest gene from enhancer 1056 is Sal-like 3 (Sall3), at about 250 Kb away. Enhancer 1538 was active in the VZ, SVZ and MZ of the ventral E11.5 MGE (FIG. 14D) and resides in the vicinity of the Nkx2-1 gene (˜70 Kb away). Lhx6 enhancer with proximal promoter (Lhx6 E/P) sits just 5′ to the Lhx6 translational start site and presumably contains an Lhx6 promoter (Du et al., 2008). The Lhx6 E/P is active in regions where endogenous Nkx2-1 is expressed; it responds to exogenous Nkx2-1 induction in brain slices and its activities were lost in Nkx2-1-null brain slices (Du et al., 2008).

[0229] To determine if these enhancers could be used in labeling mouse ES cells differentiated toward an MGE fate, we utilized a lentiviral vector, α-MHC-mCherry_Rex-Blasticidin^{r}, that previously was used to detect and isolate specific populations of differentiated ES cells (Kita-Matsuo et al., 2009). As mouse DlxI12b enhancer is smaller than human enhancer 422 (see Materials and Methods), and its activities were well documented, we used DlxI12b instead of 422 for the lentiviral constructs. We constructed three versions of the lentiviral vector for each enhancer, with different minimal promoters or none at all (FIG. 4E).

[0230] We first tested the lentiviruses (of three different vectors for DlxI12b & 692) in dissociated primary MGE cells from E13.5 mouse brains to evaluate enhancer activities. As shown in FIG. 4F-G″, enhancer DlxI12b and enhancer 692 drove mCherry expression in these cells in the absence of an introduced minimal promoter (FIGS. 4F&G; DlxI12b-mCherry and 692-mCherry). In the presence of the heat shock promoter 68 minimal promoter (hsp68), both DlxI12b and 692 produced mCherry⁺ cell clusters; however, these cells had no DAPI nuclear stains, suggesting that they were dead (FIG. 14F′&G′). The addition of a β-globin minimal promoter (βg) resulted in stronger mCherry expression driven by DlxI12b, and increased the number of mCherry⁺ cells compared to DlxI12b-mCherry (FIGS. 14F&G″). By contrast, no obvious effect was observed from the addition of the β-globin promoter to the enhancer 692 construct (692-βg-mCherry, FIG. 4G″). We also tested enhancer-less hsp68-mCherry and βg-mCherry lentiviral constructs in dissociated primary MGE cells. We found that hsp68 promoter alone drove mCherry expression, whereas β-globin promoter did not. Thus, the β-globin promoter appeared to be more suitable for our experiments.

[0231] In addition, we tested these lentiviruses by transient infection of MGE-like differentiated mouse ES cells (infected on D11, and harvested on D14) with the three different versions of lentiviral constructs for DlxI12b and 692; we found similar results as in dissociated primary MGE cells (data not shown).

[0232] Enhancer 1056 with or without a β-globin promoter produced similar amounts of mCherry+ cells in dissociated primary MGE cells (data not shown). On the contrary, enhancer 1538 without a minimal promoter did not drive mCherry expression in dissociated primary MGE cells (data not shown).

[0233] Enhancer DlxI12b Drives mCherry Expression in ˜30% of Lhx6-GFP⁺ Mouse ES-Derived MGE-Like Cells.

[0234] To explore DlxI12b enhancer activities in MGE-like, differentiated mouse ES cells, we generated stable mouse ES clones from both the E14 and J14 (Lhx6-GFP) cell lines with the DlxI12b-βg-mCherry_Rex-Blasticidin^{r} lentiviral vector (the Foxg1::venus cell line is blasticidin-resistant and cannot be used for this purpose). We analyzed mCherry expression from two independent stable clones from each cell line (EI12bBM7, EI12bBM8; JI12bBM11, JI12bBM12). All four clones produced similar numbers of mCherry⁺ cells in MGE-like differentiated ES cells (using our optimal MGE differentiation protocol). We then analyzed the expression of mCherry along the time course of ES cells differentiation. We started to detected a few DlxI12b-βg-mCherry⁺ cells on D9 (data not shown) and then the numbers of mCherry⁺ cells increased substantially on D11 and D13; by D15 there was little increase (FIG. 5A-C). Double staining of mCherry with Lhx6-GFP revealed frequent mCherry/GFP co-expression on D11, D13 and D15 (FIG. 15A″-C″). FACS analyses provided quantification of mCherry/GFP co-expression and individual protein expression (Table 11). The percentage of DlxI12b-βg-mCherry⁺ cells was low on D9. On D11, about 70-80% of the DlxI12b-βg-mCherry⁺ cells co-expressed Lhx6-GFP. On D13 and D15, 33-50% and 24-50% of the DlxI12b-βg-mCherry⁺ cells co-expressed Lhx6-GFP (Table 11).

[0235] Examining DlxI12b-βg-mCherry expression with markers of telencephalic cell types showed that 49% of the mCherry⁺ cells co-expressed Nkx2-1 on D13, and 55% of the Nkx2-1⁺ cells co-expressed mCherry (FIG. 15D and data not shown). The vast majority of DlxI12b-βg-mCherry⁺ cells co-expressed D1×2, and Calbindin on D11, D13, and D15 (FIGS. 15 E&I and data not shown). Some of the DlxI12b-βg-mCherry⁺ cells also express Foxg1, although to a smaller extent (FIG. 15F), perhaps because DlxI12b-βg-mCherry expression increased after D9, whereas Foxg1 expression decreased after D9. None of the DlxI12b-βg-mCherry⁺ cells expressed Islet1 or Olig2 (FIGS. 5G&H and data not shown), providing evidence that DlxI12b enhancer was active in the MGE-derived cortical interneuron progenitors, rather than LGE (Islet1 is expressed in LGE neurons), or oligodendrocytes (Olig2 is an early marker of oligodendrocytes).

[0236] Enhancer 692 Drives mCherry Expression in >70% of Lhx6-GFP⁺ Mouse ES-Derived MGE-Like Cells.

[0237] To analyze enhancer 692 activity we attempted to generate stable ES clones from all three lentiviral vectors (692-mCherry_Rex-Blasticidin^{r}, 692-hsp68-mCherry_Rex-Blasticidin^{r}, and 692-βg-mCherry_Rex-Blasticidin^{r}). With the 692-mCherry_Rex-Blasticidin^{r} lentivirus, 8 out of the 13 E14 clones (from two different screens) and 6 out of the 7 J14 clones analyzed expressed mCherry⁺ cells. With the 692-hsp68-mCherry_Rex-Blasticidin^{r} lentivirus, none of the 6 E14 clones and none of the only 2 J14 clones analyzed expressed mCherry⁺ cells. With the 692-βg-mCherry_Rex-Blasticidin^{r} lentivirus, 1 out of the 3 E14 clones and 4 out of 8 J14 clones (from two different screens) expressed mCherry⁺ cells. The lack of mCherry⁺ cells from 692-hsp68-mCherry clones may reflect the hsp68-dependent toxicity we identified in transiently infected MGE cells (FIG. 14F′&G′). Thus, we focused on the 692-mCherry and 692-βg-mCherry clones.

[0238] We began by studying the time course of mCherry expression. Both 692-mCherry and 692-βg-mCherry expression began in a few cells at D9 in all of the clones examined (FIG. 6A and data not shown). By D11, a few more 692-βg-mCherry⁺ and 692-mCherry⁺ cells appeared (FIG. 16B). By D13, D15, and D17 there were increasing numbers of 692-mCherry⁺ and 692-βg-mCherry⁺ cells (FIGS. 16C&D, and data not shown).

[0239] The emergence of 692-mCherry⁺ and 692-βg-mCherry⁺ cells was positively correlated with the increase of Lhx6-GFP⁺ cells. Indeed more than 50% of the Lhx6-GFP⁺ cells co-localized with the 692-mCherry⁺ and 692-βg-mCherry⁺ cells at all the time points examined. This was particularly obvious when the fraction of mCherry⁺ cells reached its highest on D15 and D17 (FIG. 16C-D″ and data not shown). Image analyses on three J14 692-mCherry clones (J6M1, J6M2, and J6M7) on D17 and three J14 692-βg-mCherry clones (J6βM31, J6βM32, J6βM33) on D15 indicated that 692-mCherry and 692-βg-mCherry were present in similar numbers of cells and the percentages of co-localization between Lhx6-GFP and mCherry were comparable (43.28%±6.13% of 692-mCherry⁺ cells were Lhx6-GFP⁺; 51.04%±8.48% of 692-βg-mCherry⁺ cells were Lhx6-GFP⁺; among Lhx6-GFP⁺ cells, 72.87%±5.22% were 692-mCherry⁺ and 70.08%±4.02% were 692-βg-mCherry⁺).

[0240] About 30-50% of 692-mCherry⁺ and 692-βg-mCherry⁺ cells co-expressed Nkx2-1 on D15 and D17; among Nkx2-1⁺ cells, 63% are 692-mCherry⁺ or 692-βg-mCherry⁺ (white arrows in FIG. 16E). On the other hand, we did not detect co-expression of mCherry with Mki67 (FIG. 16F and data not shown), suggesting that 692 enhancer was active only in postmitotic cells. Essentially all 692-mCherry⁺ cells were Sox6⁺, an MGE marker (FIG. 16G). This is interesting considering that enhancer 692 resides near the Sox6 gene.

[0241] Unfortunately, mCherry expression from enhancer 692 was not robust enough to be seen by mCherry's intrinsic fluorescence (Table 11 and data not shown); all of our analyses required immunofluoresence. Thus, we could not use FACS to isolate 692-mCherry⁺ or 692-βg-mCherry⁺ cells.

[0242] Enhancer 1056 Drives mCherry Expression in Olig2⁺ Cells and not Lhx6-GFP⁺ Cells.

[0243] Next we made J14 ES cell clones with 1056-βg-mCherry_Rex-Blasticidin^{r}. From the 4 colonies that we picked and analyzed, just 1 of them expressed mCherry. To our surprise, 1056-βg-mCherry expression did not co-localize with Lhx6-GFP expression (FIG. 17F and data not shown). Nor did 1056-βg-mCherry⁺ cells express Calbindin or GABA at all the time points examined, despite the fact that there were substantial numbers of mCherry⁺ cells (FIG. 17I and data not shown). Rarely Nkx2-1 was co-expressed with mCherry, mainly where Nkx2-1⁺ cells formed clusters (FIG. 17G). Likewise, very few of 1056-βg-mCherry⁺ cells co-expressed Islet1⁺ (FIG. 17J).

[0244] The MGE generates GABAergic neurons and oligodendrocytes (Kessaris et al., 2006; Petryniak et al., 2007). Thus, we tested whether 1056-βg-mCherry⁺ cells were oligodendrocytes, by studying Olig2 expression. As shown in FIG. 17A-E″, essentially all of the 1056-βg-mCherry⁺ expressed Olig2, although there were generally fewer 1056-βg-mCherry⁺ than Olig2⁺ cells. In addition, we found more 1056-βg-mCherry/Mki67 double positive cells on D15 and D17, than on D9 and D11 (FIG. 17H and data not shown) though there were decreased numbers of both 1056-βg-mCherry⁺ and Mki67⁺ cells on D15 and D17. This suggested some of the 1056 enhancer-labeled cells continued to divide at late time points of differentiation.

[0245] Enhancer 1538 Drives mCherry Expression in >40% of Lhx6-GFP⁺ Mouse ES-Derived MGE-Like Cells.

[0246] To test enhancer 1538 activity, we generated J14 stable ES lines with 1538-βg-mCherry_Rex-Blasticidin^{r}. We analyzed 5 clones; 2 of the clones had mCherry expression starting at D12 (FIGS. 8A &B). There were almost no mCherry⁺ cells on D10 (FIG. 18A). On D12-D14, many 1538-βg-mCherry⁺ cells appeared (FIGS. 18B&C). Though 1538 enhancer resides in close proximity to Nkx2-1 gene locus, its activity in the differentiating ES cells did not fully correlate with that of Nkx2-1 expression (FIG. 18E). In addition, enhancer 1538 activity was not detected in mitotically active (MKi67⁺) cells (FIG. 18F and data not shown). However, its expression did highly correlated to that of Lhx6-GFP (FIG. 18B″-D″). We analyzed the Lhx6-GFP⁺ and mCherry⁺ cells on D14: 40% (41.18%±4.32%) of Lhx6-GFP⁺ cells were mCherry⁺; 90% (92.26%±3.78%) of mCherry⁺ cells were Lhx6-GFP⁺. Enhancer 1538 activity was not strong enough that we did not detect any mCherry⁺ cell by FACS (Table 11); thus our analyses required mCherry immunofluoresence.

[0247] There was No mCherry Expression with Lhx6 Enhancer/Promoter Constructs.

[0248] In addition, we also generated a lentiviral vector with a putative Lhx6 promoter/enhancer DNA fragment (Lhx6 E/P-mCherry_Rex-blasticidin^{r}) hoping that it could substitute Lhx6-GFP BAC's activities. Unfortunately despite the fact that it was active in dissociated MGE cells (data not shown), we did not see any mCherry⁺ cells from MGE-like differentiated ES cells in any of the 7 stable J14 ES clones with this construct.

[0249] The DlxI12b Enhancer Continued to be Active in the Adult Cortex.

[0250] While our work focused on the activity of the enhancers in MGE-like differentiated ES cells in vitro, we did briefly explore whether the DlxI12b and 692 enhancers maintained their expression in vivo following transplantation into neonatal mouse cortex. We used FACS to purify GFP cells from MGE differentiated (D12) J14 ES cells that also carried either enhancer DlxI12b [line: DlxI12b-βg-mCherry (JI12bβM11)] or 692: [line: 692-mCherry (J6M1)]. As described above, in vitro (on D12) 30% of these Lhx6-GFP+ cells are DlxI12b-βg-mCherry⁺ (for JI12bβM11), and 70% of the Lhx6-GFP+ cells are 692-mCherry⁺ (for J6M1).

[0251] Analyses of seven transplants from JI12bβM11 [4 animals from 69 days after transplant (DAT), and 3 animals from 33 DAT] found 28.33±2.81% (mean±SEM, n=7) of Lhx6-GFP⁺ cells were DlxI12b-βg-mCherry⁺ (FIG. 9A-B″), showing that the DlxI12b enhancer continued to be active in the adult cortex. On the other hand, we had difficulty finding 692-mCherry⁺/Lhx6-GFP⁺ cells in 4 transplants from J6M1 (33 DAT) suggesting either that enhancer 692 is not active, or is very weak, in mature neurons (data not shown). Thus, enhancer DlxI12b, but not 692, is effective for labeling ES cell-derived MGE-derived mature neurons in the adult cortex.

### Example 4

### Use of “MGE Enhancers” to Monitor MGE Cell Differentiation

[0252] The use of molecular markers of specific cell states is a powerful tool for studying cell differentiation. In particular, expression of fluorescent proteins, from specific endogenous gene loci, or from transgenes (e.g. bacterial artificial chromosomes, BACs), is an effective method to identify cell states, and purify those cells. Currently, two cell lines have been generated that are useful for MGE differentiation: 1) mouse J14 ES cells that express GFP from an Lhx6 BAC (Maroof et al., 2010); 2) human ES cells that express GFP from the endogenous Nkx2-1 locus (Goulburn et al., 2011). An alternative approach, as demonstrated here, is to drive reporter expression using cell/tissue-specific promoters and/or small enhancer elements (Kita-Matsuo et al., 2009). The latter approach has several potential advantages: 1) the small size of the enhancers, often less than 1 kb, makes them ideal for insertion into viral vectors; 2) the small enhancers often have a more restricted range of tissue and cell type expression; 3) the approach is ideal for marking multiple cell lines, which would be extremely difficult using BAC transgenic or knock-in strategies; 4) knock-in strategies often alter the function of the endogenous gene which can alter the developmental potential of the cells.

[0253] In Example 1, we have identified a large number of enhancer-like elements in the human genome that drive expression in specific subdivisions of the embryonic mouse telencephalon (Visel et al., submitted; see enhancer.lbl.gov website). Some of these enhancers drive expression in the E11.5 MGE. Here we explored the function of three of these (novel enhancers 692, 1056, and 1538), in addition to the DlxI12b and Lhx6 promoter/enhancers (Ghanem et al., Distinct cis-regulatory elements from the Dlx1/Dlx2 locus mark different progenitor cell populations in the ganglionic eminences and different subtypes of adult cortical interneurons. J Neurosci 27:5012-5022, 2007; Du et al., NKX2.1 specifies cortical interneuron fate by activating Lhx6. Development 135:1559-1567, 2008; Potter et al., Generation of Cre-transgenic mice using Dlx1/Dlx2 enhancers and their characterization in GABAergic interneurons. Mol Cell Neurosci 40:167-186, 2009). We introduced each of these five enhancers into the E14 and J14 (Lhx6-GFP) lines of mouse ES cells (Maroof et al., Prospective isolation of cortical interneuron precursors from mouse embryonic stem cells. J Neurosci 30:4667-4675, 2010) using the vector described by Kita-Matsuo et al., Lentiviral vectors and protocols for creation of stable hESC lines for fluorescent tracking and drug resistance selection of cardiomyocytes. PLoS One 4:e5046 (2009), subjected them to the MGE differentiation protocol, and analyzed mCherry expression in differentiated ES cells. Four of the enhancers drove mCherry expression in MGE-like cells; only the Lhx6 enhancer did not work. Enhancer 1056 drove expression in OLIG2⁺/Lhx6-GFP⁻ cells (FIG. 17). This is consistent with the observation that the MGE generates oligodendrocytes (Kessaris et al., Competing waves of oligodendrocytes in the forebrain and postnatal elimination of an embryonic lineage. Nature neuroscience 9:173-179, 2006; Petryniak et al., Dlx1 and Dlx2 control neuronal versus oligodendroglial cell fate acquisition in the developing forebrain. Neuron 55:417-433, 2007). We predict that enhancer 1056 will be useful for driving expression in oligodendrocyte progenitors.

[0254] Enhancers DlxI12b, 692, and 1538 drove mCherry expression in MGE-like neurons (Nkx2-1⁺/Lhx6-GFP⁺), but not Olig2⁺ cells (FIGS. 15, 16 & 18). Given that Lhx6⁺ cells derived from J14 cells have properties of immature pallial interneurons, based on gene expression array analysis (Table 1) and in transplantation assays (FIG. 19; data not shown; (Maroof et al., Prospective isolation of cortical interneuron precursors from mouse embryonic stem cells. J Neurosci 30:4667-4675, 2010)), we propose that DlxI12b, 692, and 1538 drive expression in cells with properties of MGE-derived interneurons.

[0255] DlxI12b enhancer was active in both immature and mature pallial interneurons sixty days after transplantation into the neocortex, whereas enhancer 692 appeared to be active only in immature MGE cells. In the future, one could follow the fate of 692⁺ cells at postnatal ages by transducing a constitutive GFP reporter into the cells prior to transplantation. Furthermore, it will be of interest to follow the fate of enhancer 1056 marked cells (1056-βg-mCherry⁺ cells) following cortical transplantation to determine whether they develop into mature oligodendrocytes, or whether they die, as proposed for some MGE-derived oligodendrocytes (Kessaris et al., Competing waves of oligodendrocytes in the forebrain and postnatal elimination of an embryonic lineage. Nature neuroscience 9:173-179, 2006).

[0256] The survival rate of FACS sorted cells after transplantation into the cortex was extremely low, about 1% (similar to Maroof et al., J Neurosci 30:4667-4675, 2010). We suspect that some of the low viability may be due to the cell sorting process. In the future it will be beneficial to pursue other possible methods of isolating cells, such as using magnetic bead-conjugated antibodies, or finding enhancers that drive expression in dividing cells. Currently, aside from enhancer 1056, which is expressed in mitotically active (Mki67⁺) Olig2⁺ cells, none of the “MGE neuronal enhancers” show robust expression in mitotically active cells. In vivo, some of the enhancers (692, 1056, and 1538) are active in the VZ (FIGS. 4B&C, and data not shown), whereas only 1056 shows activity in mitotically active ES cells (FIG. 17H). We do not know why 692 and 1538 activity is not detected in the ES-derived dividing MGE-like progenitors cells. It will be helpful to identify an “MGE enhancer” that drives expression in dividing cells, to enable selection with a drug-resistance gene. This would greatly facilitate generating large numbers of homogeneous MGE interneuron progenitors for further study and, ultimately, for transplantation in diseased states.

[0257] Our approach of using highly specific small enhancers may have general utilities for generating diverse types of CNS cells. For instance, we have identified enhancers for the LGE and pallium, including its regional subdivisions (Visel et al., submitted; see enhancer.lbl.gov website) that can be used for selecting these types of progenitors and their derivatives. Introducing these enhancer constructs into ES and iPS cells may facilitate identification and isolation of many different neural cell lineages for basic and translational studies.

### Example 5

### Use of “MGE Enhancers” to Purify MGE Cells

[0258] Several methods can be used to purify enhancer-labeled MGE-derived cells. 1. FACSorting. This is as described above and in Chen et al., submitted paper. Briefly, enhancer-drived fluorescent proteins (such as GFP or mCherry) can be detected in a fluorescent activated cell sorting (FACS) machine. Cells that are of the right cell state in which an enhancer is active will express the fluorescent proteins and be purified by FACS. 2. Magnetic beads purification. There are many surface protein antibodies that are conjugated with magnetic beads. Using a surface protein that is not expressed in neural cells, we can drive its expression in the differentiated embryonic stem cells with an enhancer selected from SEQ ID NOS:1-145. Cells that are of the right cell state can then be purified through incubation with antibody-beads, and by magnetic field. Cells that are not bound with antibody-beads (because it does not express the enhancer-surface protein) will be washed away. 3. Immunopanning. This is similar to magnetic beads purification. But instead of using magnetic field, antibodies for surface proteins are fixed on a plate. Cells that are of the right cell state (and therefore express the enhancer-surface protein) will bind and remain inside the plate, whereas cells that are not of the right state will be washed away.

### Example 6

### Use of “MGE Enhancers” in Non-Pluripotent Cells for Cell Transplantation and Drug Screening

[0259] Non-pluripotent somatic cells would be obtained from a patient (for example during a skin biopsy or blood test procedure) not affected or affected by a disorder or disease. Somatic cells would then be cultured and transfected with an MGE Enhancer(s) and promoter driving a fluorescent protein, and with reprogramming genes. In one embodiment, somatic cells would first be reprogrammed to pluripotency with genes such as OCT4, KLF4, SOX2, NANOG, CMYC and then differentiated toward an MGE neural cell fate.

[0260] In a second embodiment, somatic cells would be cultured and transfected with neural-determinate genes, such as ASCL1, BRN2, MYT1L, NEUROD1/2, in order to directly induce an MGE neural cell fate. An MGE Enhancer(s) and promoter driving a fluorescent protein would be transfected before and/or after the reprogramming step. Induced MGE cells would then be identified by virtue of their fluorescence, and could also be isolated by fluorescence-activated cell sorting and resuspended in solution.

[0261] Somatic cells reprogrammed into MGE cells with MGE enhancers can then be used for transplantation into the nervous system to treat patients with epilepsy, Parkinson's disease, schizophrenia, neuropathic pain, spinal cord injury, autism, Alzheimer's disease, and/or Huntington's disease. Cells could be isolated based on their MGE enhancer activity, and the MGE cell suspension would be injected into the nervous system.

[0262] Reprogrammed MGE cells generated using the enhancers could also be used for screening or assaying drugs for a therapeutic effect. For examples, neurons from healthy individuals (e.g., cortical, striatal, motor neurons) could be used to test for neurotoxicity of a compound.), or cortical neurons from patient who has a neurodegenerative disease (e.g., ALS, Alzheimers, Huntington's, Parkinson's, frontotemporal dementia) could be tested for compounds that prolong the survival of the cells, or neurons from patient with a neurological disease that alters neuronal function (e.g., epilepsy caused by an electrophysiological, signaling, synaptic defect) could be tested for compounds that improve that aspect of neuronal function.

[0263] The above examples are provided to illustrate the invention but not to limit its scope. Other variants of the invention will be readily apparent to one of ordinary skill in the art and are encompassed by the appended claims. All patents and publications referenced herein are hereby incorporated by reference in their entireties for all purposes.

TABLE 1
Data retrieved from sequence database

| Element ID | | | | | SEQ ID | | human coordinates (hg19) |
|---|---|---|---|---|---|---|---|
| Element ID | chromosome | start | end | length | NO: | number | coordinates (hg19) |
| hs12 | chr16 | 78510608 | 78511944 | 1336 | 1 | 12 | chr16:78510609-78511944 |
| hs22 | chr16 | 72254566 | 72255825 | 1259 | 2 | 22 | chr16:72254567-72255825 |
| hs37 | chr16 | 54650598 | 54651882 | 1284 | 3 | 37 | chr16:54650599-54651882 |
| hs71 | chr16 | 51671181 | 51672039 | 858 | 4 | 71 | chr16:51671182-51672039 |
| hs110 | chr7 | 21003280 | 21004750 | 1470 | 5 | 110 | chr7:21003281-21004750 |
| hs11 | chr7 | 42191728 | 42193638 | 1910 | 6 | 111 | chr7:42191729-42193638 |
| hs112 | chr9 | 973435 | 975288 | 1853 | 7 | 112 | chr9:973436-975288 |
| hs119 | chrX | 24915382 | 24918272 | 2890 | 8 | 119 | chrX:24915383-24918272 |
| hs121 | chrX | 25007879 | 25009581 | 1702 | 9 | 121 | chrX:25007880-25009581 |
| hs122 | chrX | 25017067 | 25018756 | 1689 | 10 | 122 | chrX:25017068-25018756 |
| hs123 | chrX | 25400224 | 25402334 | 2110 | 11 | 123 | chrX:25400225-25402334 |
| hs145 | chrX | 25018871 | 25020532 | 1661 | 12 | 145 | chrX:25018872-25020532 |
| hs170 | chr2 | 164450144 | 164451758 | 1614 | 13 | 170 | chr2:164450145-164451758 |
| hs174 | chr1 | 87821621 | 87823082 | 1461 | 14 | 174 | chr1:87821622-87823082 |
| hs187 | chr3 | 71290418 | 71292584 | 2166 | 15 | 187 | chr3:71290419-71292584 |
| hs192 | chr3 | 180773639 | 180775802 | 2163 | 16 | 192 | chr3:180773640-180775802 |
| hs200 | chr1 | 51165195 | 51166786 | 1591 | 17 | 200 | chr1:51165196-51166786 |
| hs204 | chr1 | 213597964 | 213599524 | 1560 | 18 | 204 | chr1:213597965-213599524 |
| hs218 | chr7 | 114056847 | 114058647 | 1800 | 19 | 218 | chr7:114056848-114058647 |
| hs240 | chr9 | 83727123 | 83728378 | 1255 | 20 | 240 | chr9:83727124-83728378 |
| hs242 | chr2 | 174114371 | 174115933 | 1562 | 21 | 242 | chr2:174114372-174115933 |
| hs244 | chr2 | 174988737 | 174990363 | 1626 | 22 | 244 | chr2:174988738-174990363 |
| hs262 | chr5 | 76940836 | 76941396 | 560 | 23 | 262 | chr5:76940837-76941396 |
| hs266 | chr5 | 87168414 | 87169433 | 1019 | 24 | 266 | chr5:87168415-87169433 |
| hs267 | chr5 | 87239942 | 87241645 | 1703 | 25 | 267 | chr5:87239943-87241645 |
| hs268 | chr5 | 87692154 | 87693265 | 1111 | 26 | 268 | chr5:87692155-87693265 |
| hs269 | chr5 | 90928612 | 90929226 | 614 | 27 | 269 | chr5:90928613-90929226 |
| hs271 | chr5 | 93226985 | 93228322 | 1337 | 28 | 271 | chr5:93226986-93228322 |
| hs281 | chr6 | 41523224 | 41523677 | 453 | 29 | 281 | chr6:41523225-41523677 |
| hs293 | chr7 | 1265154 | 1266318 | 1164 | 30 | 293 | chr7:1265155-1266318 |
| hs304 | chr9 | 8095553 | 8096166 | 613 | 31 | 304 | chr9:8095554-8096166 |
| hs312 | chr9 | 81471747 | 81473114 | 1367 | 32 | 312 | chr9:81471748-81473114 |
| hs313 | chr9 | 81870622 | 81872224 | 1602 | 33 | 313 | chr9:81870623-81872224 |
| hs322 | chr1 | 87821793 | 87822910 | 1117 | 34 | 322 | chr1:87821794-87822910 |
| hs342 | chr14 | 29860529 | 29862348 | 1819 | 35 | 342 | chr14:29860530-29862348 |
| hs348 | chr14 | 36020024 | 36020998 | 974 | 36 | 348 | chr14:36020025-36020998 |
| hs388 | chr2 | 7774393 | 7775070 | 677 | 37 | 388 | chr2:7774394-7775070 |
| hs399 | chr2 | 60441495 | 60442515 | 1020 | 38 | 399 | chr2:60441496-60442515 |
| hs408 | chr1 | 10851570 | 10852173 | 603 | 39 | 408 | chr1:10851571-10852173 |
| hs411 | chr2 | 156726581 | 156727605 | 1024 | 40 | 411 | chr2:156726582-156727605 |
| hs416 | chr2 | 162094895 | 162095451 | 556 | 41 | 416 | chr2:162094896-162095451 |
| hs422 | chr2 | 172955879 | 172957052 | 1173 | 42 | 422 | chr2:172955880-172957052 |
| hs427 | chrX | 139169379 | 139171545 | 2166 | 43 | 427 | chrX:139169380-139171545 |
| hs433 | chr14 | 30741750 | 30743626 | 1876 | 44 | 433 | chr14:30741751-30743626 |
| hs480 | chr20 | 30191716 | 30192554 | 838 | 45 | 480 | chr20:30191717-30192554 |
| hs488 | chr13 | 95358263 | 95360017 | 1754 | 46 | 488 | chr13:95358264-95360017 |
| hs532 | chr13 | 28395961 | 28397536 | 1575 | 47 | 532 | chr13:28395962-28397536 |
| hs540 | chr13 | 71358093 | 71359507 | 1414 | 48 | 540 | chr13:71358094-71359507 |
| hs545 | chr1 | 243876467 | 243877893 | 1426 | 49 | 545 | chr1:243876468-243877893 |
| hs550 | chr7 | 13506207 | 13507276 | 1069 | 50 | 550 | chr7:13506208-13507276 |
| hs553 | chr2 | 172936519 | 172938249 | 1730 | 51 | 553 | chr2:172936520-172938249 |
| hs565 | chr11 | 31622822 | 31624118 | 1296 | 52 | 565 | chr1l:31622823-31624118 |
| hs566 | chr14 | 29684896 | 29686744 | 1848 | 53 | 566 | chr14:29684897-29686744 |
| hs582 | chrX | 81464240 | 81465016 | 776 | 54 | 582 | chrX:81464241-81465016 |
| hs590 | chr18 | 34719386 | 34720720 | 1334 | 55 | 590 | chr18:34719387-34720720 |
| hs595 | chr10 | 76177765 | 76179000 | 1235 | 56 | 595 | chr10:76177766-76179000 |
| hs599 | chr15 | 37652783 | 37654460 | 1677 | 57 | 599 | chr15:37652784-37654460 |
| hs609 | chr2 | 147172004 | 147173802 | 1798 | 58 | 609 | chr2:147172005-147173802 |
| hs611 | chr12 | 111495397 | 111496252 | 855 | 59 | 611 | chr12:111495398-111496252 |
| hs612 | chr1 | 91305562 | 91307215 | 1653 | 60 | 612 | chr1:91305563-91307215 |
| hs619 | chr13 | 72333516 | 72334988 | 1472 | 61 | 619 | chr13:72333517-72334988 |
| hs622 | chr14 | 99466200 | 99467144 | 944 | 62 | 622 | chr14:99466201-99467144 |
| hs631 | chr8 | 36957851 | 36958723 | 872 | 63 | 631 | chr8:36957852-36958723 |
| hs632 | chr20 | 2719208 | 2719789 | 581 | 64 | 632 | chr20:2719209-2719789 |
| hs634 | chr18 | 76006820 | 76008476 | 1656 | 65 | 634 | chr18:76006821-76008476 |
| hs636 | chr3 | 157882303 | 157883963 | 1660 | 66 | 636 | chr3:157882304-157883963 |
| hs643 | chr9 | 23004730 | 23005789 | 1059 | 67 | 643 | chr9:23004731-23005789 |
| hs649 | chr2 | 146689050 | 146690099 | 1049 | 68 | 649 | chr2:146689051-146690099 |
| hs653 | chr3 | 137185964 | 137186866 | 902 | 69 | 653 | chr3:137185965-137186866 |
| hs654 | chr3 | 147801015 | 147802169 | 1154 | 70 | 654 | chr3:147801016-147802169 |
| hs656 | chr10 | 131400948 | 131402279 | 1331 | 71 | 656 | chr10:131400949-131402279 |
| hs660 | chr15 | 67198974 | 67200134 | 1160 | 72 | 660 | chr15:67198975-67200134 |
| hs671 | chr1 | 97610491 | 97611741 | 1250 | 73 | 671 | chr1:97610492-97611741 |
| hs672 | chr10 | 120074039 | 120075696 | 1657 | 74 | 672 | chr10:120074040-120075696 |
| hs675 | chr2 | 144103882 | 144105644 | 1762 | 75 | 675 | chr2:144103883-144105644 |
| hs676 | chr6 | 97544611 | 97545759 | 1148 | 76 | 676 | chr6:97544612-97545759 |
| hs687 | chr4 | 54881222 | 54882455 | 1233 | 77 | 687 | chr4:54881223-54882455 |
| hs692 | chr11 | 15587041 | 15588314 | 1273 | 78 | 692 | chr11:15587042-15588314 |
| hs702 | chr2 | 105132815 | 105133830 | 1015 | 79 | 702 | chr2:105132816-105133830 |
| hs742 | chr8 | 78042571 | 78044201 | 1630 | 80 | 742 | chr8:78042572-78044201 |
| hs748 | chr10 | 78390590 | 78391875 | 1285 | 81 | 748 | chr10:78390591-78391875 |
| hs775 | chr18 | 77010009 | 77010795 | 786 | 82 | 775 | chr18:77010010-77010795 |
| hs781 | chr8 | 21907426 | 21908282 | 856 | 83 | 781 | chr8:21907427-21908282 |
| hs782 | chr8 | 21901089 | 21902326 | 1237 | 84 | 782 | chr8:21901090-21902326 |
| hs798 | chr12 | 16170590 | 16171824 | 1234 | 85 | 798 | chr12:16170591-16171824 |
| hs799 | chr7 | 9271308 | 9272358 | 1050 | 86 | 799 | chr7:9271309-9272358 |
| hs807 | chr7 | 22091362 | 22092557 | 1195 | 87 | 807 | chr7:22091363-22092557 |
| hs818 | chr9 | 128520992 | 128522653 | 1661 | 88 | 818 | chr9:128520993-128522653 |
| hs840 | chr4 | 66989480 | 66990366 | 886 | 89 | 840 | chr4:66989481-66990366 |
| hs841 | chr10 | 118854124 | 118855243 | 1119 | 90 | 841 | chr10:118854125-118855243 |
| hs844 | chr7 | 20832628 | 20833902 | 1274 | 91 | 844 | chr7:20832629-20833902 |
| hs848 | chr16 | 51491799 | 51493025 | 1226 | 92 | 848 | chr16:51491800-51493025 |
| hs852 | chr9 | 13750115 | 13751398 | 1283 | 93 | 852 | chr9:13750116-13751398 |
| hs853 | chr5 | 87083012 | 87084752 | 1740 | 94 | 853 | chr5:87083013-87084752 |
| hs876 | chr9 | 133540555 | 133541228 | 673 | 95 | 876 | chr9:133540556-133541228 |
| hs886 | chr4 | 181201559 | 181202529 | 970 | 96 | 886 | chr4:181201560-181202529 |
| hs914 | chr20 | 21214790 | 21217232 | 2442 | 97 | 914 | chr20:21214791-21217232 |
| hs921 | chr2 | 236962599 | 236964857 | 2258 | 98 | 921 | chr2:236962600-236964857 |
| hs952 | chr5 | 91442456 | 91444549 | 2093 | 99 | 952 | chr5:91442457-91444549 |
| hs953 | chr2 | 175203263 | 175204895 | 1632 | 100 | 953 | chr2:175203264-175204895 |
| hs956 | chr7 | 114299711 | 114302078 | 2367 | 101 | 956 | chr7:114299712-114302078 |
| hs957 | chr2 | 60761404 | 60763073 | 1669 | 102 | 957 | chr2:60761405-60763073 |
| hs969 | chr2 | 105317580 | 105319856 | 2276 | 103 | 969 | chr2:105317581-105319856 |
| hs971 | chr5 | 91970162 | 91972034 | 1872 | 104 | 971 | chr5:91970163-91972034 |
| hs978 | chr6 | 97754043 | 97755513 | 1470 | 105 | 978 | chr6:97754044-97755513 |
| hs981 | chr4 | 113442390 | 113443530 | 1140 | 106 | 981 | chr4:113442391-113443530 |
| hs987 | chr9 | 128869446 | 128870934 | 1488 | 107 | 987 | chr9:128869447-128870934 |
| hs998 | chr12 | 103406124 | 103408154 | 2030 | 108 | 998 | chr12:103406125-103408154 |
| hs1006 | chr10 | 102244842 | 102246334 | 1492 | 109 | 1006 | chr10:102244843-102246334 |
| hs1007 | chr7 | 20997668 | 20999102 | 1434 | 110 | 1007 | chr7:20997669-20999102 |
| hs1019 | chr7 | 20838843 | 20840395 | 1552 | 111 | 1019 | chr7:20838844-20840395 |
| hs1024 | chr5 | 92312840 | 92314645 | 1805 | 112 | 1024 | chr5:92312841-92314645 |
| hs1025 | chr2 | 73124730 | 73126091 | 1361 | 113 | 1025 | chr2:73124731-73126091 |
| hs1027 | chr18 | 22744668 | 22746270 | 1602 | 114 | 1027 | chr18:22744669-22746270 |
| hs1032 | chr10 | 119309200 | 119310544 | 1344 | 115 | 1032 | chr10:119309201-119310544 |
| hs1035 | chr6 | 98074091 | 98075722 | 1631 | 116 | 1035 | chr6:98074092-98075722 |
| hs1041 | chr9 | 82010246 | 82011547 | 1301 | 117 | 1041 | chr9:82010247-82011547 |
| hs1050 | chr4 | 109531908 | 109533465 | 1557 | 118 | 1050 | chr4:109531909-109533465 |
| hs1052 | chr6 | 18536628 | 18538267 | 1639 | 119 | 1052 | chr6:18536629-18538267 |
| hs1056 | chr18 | 76481722 | 76483257 | 1535 | 120 | 1056 | chr18:76481723-76483257 |
| hs1060 | chr5 | 92613862 | 92616844 | 2982 | 121 | 1060 | chr5:92613863-92616844 |
| hs1066 | chr2 | 63275695 | 63277103 | 1408 | 122 | 1066 | chr2:63275696-63277103 |
| hs1078 | chr9 | 82224085 | 82226757 | 2672 | 123 | 1078 | chr9:82224086-82226757 |
| hs1100 | chr6 | 41560717 | 41562075 | 1358 | 124 | 1100 | chr6:41560718-41562075 |
| hs1172 | chr5 | 92634702 | 92636476 | 1774 | 125 | 1172 | chr5:92634703-92636476 |
| hs1187 | chr5 | 50390899 | 50392257 | 1358 | 126 | 1187 | chr5:50390900-50392257 |
| hs1210 | chr2 | 66762515 | 66765088 | 2573 | 127 | 1210 | chr2:66762516-66765088 |
| hs1226 | chr7 | 21080801 | 21082086 | 1285 | 128 | 1226 | chr7:21080802-21082086 |
| hs1316 | chr3 | 62405817 | 62408099 | 2282 | 129 | 1316 | chr3:62405818-62408099 |
| hs1318 | chr8 | 77598007 | 77600645 | 2638 | 130 | 1318 | chr8:77598008-77600645 |
| hs1321 | chr5 | 50467950 | 50469989 | 2039 | 131 | 1321 | chr5:50467951-50469989 |
| hs1324 | chr1 | 213498112 | 213501134 | 3022 | 132 | 1324 | chr1:213498113-213501134 |
| hs1325 | chr7 | 25791903 | 25794282 | 2379 | 133 | 1325 | chr7:25791904-25794282 |
| hs1329 | chr8 | 28370867 | 28371860 | 993 | 134 | 1329 | chr8:28370868-28371860 |
| hs1334 | chr10 | 37054745 | 37057224 | 2479 | 135 | 1334 | chr10:37054746-37057224 |
| hs1336 | chr7 | 34097962 | 34100011 | 2049 | 136 | 1336 | chr7:34097963-34100011 |
| hs1339 | chr9 | 92292484 | 92293889 | 1405 | 137 | 1339 | chr9:92292485-92293889 |
| hs1340 | chr6 | 20867105 | 20870529 | 3424 | 138 | 1340 | chr6:20867106-20870529 |
| hs1341 | chr12 | 97468703 | 97471089 | 2386 | 139 | 1341 | chr12:97468704-97471089 |
| hs1345 | chr5 | 107299863 | 107302976 | 3113 | 140 | 1345 | chr5:107299864-107302976 |
| hs1358 | chr6 | 163276830 | 163279930 | 3100 | 141 | 1358 | chr6:163276831-163279930 |
| hs1359 | chr9 | 84264195 | 84266950 | 2755 | 142 | 1359 | chr9:84264196-84266950 |
| hs1361 | chr4 | 153287655 | 153290517 | 2862 | 143 | 1361 | chr4:153287656-153290517 |
| hs1538 | chr14 | 36911162 | 36914360 | 3198 | 144 | 1538 | chr14:36911163-36914360 |
| hs1578 | chr2 | 212254840 | 212257158 | 2318 | 145 | 1578 | chr2:212254841-212257158 |

| | | | | EMT | EMT | EMT | CP | MP | MP | MP | DP | DP | DP | LP | LP | LP | VP |
|---|---|---|---|---|---|---|---|---|---|---|---|---|---|---|---|---|---|
| Element ID | hg19 coordinates | SEQ ID NO: | ID | VZ | SVZ | MZ | VZ | VZ | SVZ | MZ | VZ | SVZ | MZ | VZ | SVZ | MZ | VZ |
| 12 | chr16 78510608 78511944 | 1 | hs12 | | | | x | x | | | | | | | | | |
| 22 | chr16 72254566 72255825 | 2 | hs22 | | | x | | | | | x | x | x | x | x | x | x |
| 37 | chr16 54650598 54651882 | 3 | hs37 | | | | | x | x | x | | | | | | | |
| 71 | chr16 51671181 51672039 | 4 | hs71 | | | | | | | | | | | | | | |
| 110 | chr7 21003280 21004750 | 5 | hs110 | | | | | | | | | | | | | | |
| 111 | chr7 42191728 42193638 | 6 | hs111 | x | x | x | | x | x | x | x | x | x | x | x | x | x |
| 112 | chr9 973435 975288 | 7 | hs112 | | | | | x | x | x | x | x | x | | | | |
| 119 | chrX 24915382 24918272 | 8 | hs119 | | | | | | | | | | | | | | |
| 121 | chrX 25007879 25009581 | 9 | hs121 | | | | | | | | | | | | | | |
| 122 | chrX 25017067 25018756 | 10 | hs122 | x | | | x | x | x | x | x | x | x | x | x | x | x |
| 123 | chrX 25400224 25402334 | 11 | hs123 | | | | | x | x | x | x | x | x | | | | |
| 145 | chrX 25018871 25020532 | 12 | hs145 | x | x | x | | | | | | | | | | | |
| 170 | chr2 164450144 164451758 | 13 | hs170 | | | | | | | | | | | | | | x |
| 174 | chr1 87821621 87823082 | 14 | hs174 | | | | | | | x | | | x | | | x | |
| 187 | chr3 71290418 71292584 | 15 | hs187 | | | | | | | | x | | | | | | |
| 192 | chr3 180773639 180775802 | 16 | hs192 | | | | | x | | | | | | | | | |
| 200 | chr1 51165195 51166786 | 17 | hs200 | | | | | | | | x | x | x | x | x | x | x |
| 204 | chr1 213597964 213599524 | 18 | hs204 | | | | | | | | | | | | | | |
| 218 | chr7 114056847 114058647 | 19 | hs218 | | | | | | | | x | x | x | x | x | x | |
| 240 | chr9 83727123 83728378 | 20 | hs240 | | | | | | | | | | | x | x | x | x |
| 242 | chr2 174114371 174115933 | 21 | hs242 | | | | | | | | | | | | | | |
| 244 | chr2 174988737 174990363 | 22 | hs244 | | | | | | | | | | | | | | |
| 262 | chr5 76940836 76941396 | 23 | hs262 | | | | | | | | | | | | | | |
| 266 | chr5 87168414 87169433 | 24 | hs266 | | | | | x | x | x | x | x | x | x | x | x | x |
| 267 | chr5 87239942 87241645 | 25 | hs267 | x | x | x | | | | | x | x | x | x | x | x | x |
| 268 | chr5 87692154 87693265 | 26 | hs268 | x | x | x | | x | x | x | x | x | x | x | x | x | x |
| 269 | chr5 90928612 90929226 | 27 | hs269 | | | | | | | | | | | | | | |
| 271 | chr5 93226985 93228322 | 28 | hs271 | | | | | | | | x | x | x | x | x | x | x |
| 281 | chr6 41523224 41523677 | 29 | hs281 | | | | | | | | x | x | x | | | | |
| 293 | chr7 1265154 1266318 | 30 | hs293 | x | x | x | | | | x | | | x | | | x | |
| 304 | chr9 8095553 8096166 | 31 | hs304 | | | | | | | | | | | | | | |
| 312 | chr9 81471747 81473114 | 32 | hs312 | | | | | | | | | | | | | | |
| 313 | chr9 81870622 81872224 | 33 | hs313 | x | x | x | | | | | | | | | | | |
| 322 | chr1 87821793 87822910 | 34 | hs322 | | | | | | | x | | | x | | | x | |
| 342 | chr14 29860529 29862348 | 35 | hs342 | | | | | | | | | | | | | | |
| 348 | chr14 36020024 36020998 | 36 | hs348 | x | x | x | x | x | x | x | | | | | | | |
| 388 | chr2 7774393 7775070 | 37 | hs388 | | | | | | | | | | | | | | |
| 399 | chr2 60441495 60442515 | 38 | hs399 | | | | | | | | | | x | | | x | |
| 408 | chr1 10851570 10852173 | 39 | hs408 | | | | | | | | | | | | | | |
| 411 | chr2 156726581 156727605 | 40 | hs411 | | | | x | | | | | | | | | | |
| 416 | chr2 162094895 162095451 | 41 | hs416 | x | x | x | | | | | | | | | | | |
| 422 | chr2 172955879 172957052 | 42 | hs422 | | | | | | | | | | | | | | |
| 427 | chrX 139169379 139171545 | 43 | hs427 | | | | | | | | x | x | x | x | x | x | x |
| 433 | chr14 30741750 30743626 | 44 | hs433 | | | | | | | | x | x | x | x | x | x | x |
| 480 | chr20 30191716 30192554 | 45 | hs480 | | | | x | x | x | x | | | | | | | |
| 488 | chr13 95358263 95360017 | 46 | hs488 | | | | | | | | x | x | x | x | x | x | x |
| 532 | chr13 28395961 28397536 | 47 | hs532 | | | | | | | | | | | | | | |
| 540 | chr13 71358093 71359507 | 48 | hs540 | | | | | | | | | | | | | | |
| 545 | chr1 243876467 243877893 | 49 | hs545 | | | | | | | | | | | | | | |
| 550 | chr7 13506207 13507276 | 50 | hs550 | | | | | | | | | | | | | | |
| 553 | chr2 172936519 172938249 | 51 | hs553 | | | | | | | | | | | | | | |
| 565 | chr11 31622822 31624118 | 52 | hs565 | | | | x | x | x | x | | | | | | | |
| 566 | chr14 29684896 29686744 | 53 | hs566 | | | | | | | | | | | | | | |
| 582 | chrX 81464240 81465016 | 54 | hs582 | | | | | | | | | | | | | | |
| 590 | chr18 34719386 34720720 | 55 | hs590 | | | | | | | | | | | | | | |
| 595 | chr10 76177765 76179000 | 56 | hs595 | | | | | | | | x | x | x | x | x | x | |
| 599 | chr15 37652783 37654460 | 57 | hs599 | | | | | | | | | | | | | | |
| 609 | chr2 147172004 147173802 | 58 | hs609 | | | | | | | | | | | | | | |
| 611 | chr12 111495397 111496252 | 59 | hs611 | | | | x | x | x | x | | | | | | | |
| 612 | chr1 91305562 91307215 | 60 | hs612 | x | x | x | x | x | x | x | | | | | | | |
| 619 | chr13 72333516 72334988 | 61 | hs619 | | | | | | | | | | | x | x | x | x |
| 622 | chr14 99466200 99467144 | 62 | hs622 | | | | | | | x | | | x | | | | |
| 631 | chr8 36957851 36958723 | 63 | hs631 | | | | x | x | x | x | | | | | | | |
| 632 | chr20 2719208 2719789 | 64 | hs632 | | | | | | | | | | | | | | |
| 634 | chr18 76006820 76008476 | 65 | hs634 | x | x | x | | | | | | | | | | | |
| 636 | chr3 157882303 157883963 | 66 | hs636 | | | | | | | | | | | x | x | x | x |
| 643 | chr9 23004730 23005789 | 67 | hs643 | | | | | x | x | x | | | | | | | |
| 649 | chr2 146689050 146690099 | 68 | hs649 | | | | | | | | | | | | | | |
| 653 | chr3 137185964 137186866 | 69 | hs653 | | | | | x | x | x | | | | | | | |
| 654 | chr3 147801015 147802169 | 70 | hs654 | | | | x | x | x | x | | | | | | | |
| 656 | chr10 131400948 131402279 | 71 | hs656 | | | | | | | | | | | | | | |
| 660 | chr15 67198974 67200134 | 72 | hs660 | | | | | | | | | | | | | | |
| 671 | chr1 97610491 97611741 | 73 | hs671 | | | | | | | | x | x | x | x | x | x | x |
| 672 | chr10 120074039 120075696 | 74 | hs672 | x | x | x | | x | x | x | x | x | x | x | x | x | x |
| 675 | chr2 144103882 144105644 | 75 | hs675 | | | | | | | | | | | | | | |
| 676 | chr6 97544611 97545759 | 76 | hs676 | | | | | | | | | | | | | | |
| 687 | chr4 54881222 54882455 | 77 | hs687 | | | | | | | | | | | | | | |
| 692 | chr11 15587041 15588314 | 78 | hs692 | | | | | | | | | | | | | | |
| 702 | chr2 105132815 105133830 | 79 | hs702 | | | x | | | | | | | | | | | |
| 742 | chr8 78042571 78044201 | 80 | hs742 | | | | | | | x | | | x | | | x | |
| 748 | chr10 78390590 78391875 | 81 | hs748 | | | | | | | | | | | | | | |
| 775 | chr18 77010009 77010795 | 82 | hs775 | | | | | | | | | | | | | | x |
| 781 | chr8 21907426 21908282 | 83 | hs781 | x | x | x | x | | | | | | | | | | |
| 782 | chr8 21901089 21902326 | 84 | hs782 | | | | | | | | | | | | | | |
| 798 | chr12 16170590 16171824 | 85 | hs798 | | | | | x | x | x | | | | | | | |
| 799 | chr7 9271308 9272358 | 86 | hs799 | | | | | | | | | | | | | | |
| 807 | chr7 22091362 22092557 | 87 | hs807 | | | | | | | | | | | | | | |
| 818 | chr9 128520992 128522653 | 88 | hs818 | | | | | | | | | | | | | (x) | |
| 840 | chr4 66989480 66990366 | 89 | hs840 | x | x | | | x | x | x | x | x | x | x | x | x | x |
| 841 | chr10 118854124 118855243 | 90 | hs841 | | | | | | | | | | | | | | |
| 844 | chr7 20832628 20833902 | 91 | hs844 | x | x | x | | | | | x | x | x | | | | |
| 848 | chr16 51491799 51493025 | 92 | hs848 | | | | | | | | | | | | | | x |
| 852 | chr9 13750115 13751398 | 93 | hs852 | | | | | | | | | | x | | | x | |
| 853 | chr5 87083012 87084752 | 94 | hs853 | | | | x | x | x | x | x | x | x | x | x | x | x |
| 876 | chr9 133540555 133541228 | 95 | hs876 | | | | | | | | | | | x | x | x | x |
| 886 | chr4 181201559 181202529 | 96 | hs886 | | | | | x | x | x | | | | | | | |
| 914 | chr20 21214790 21217232 | 97 | hs914 | | | | | | | | | | | | | | |
| 921 | chr2 236962599 236964857 | 98 | hs921 | | | x | | | | | | | | | | | |
| 952 | chr5 91442456 91444549 | 99 | hs952 | | x | x | | x | x | x | | | | | | | |
| 953 | chr2 175203263 175204895 | 100 | hs953 | | | | | | | | | | | | | | |
| 956 | chr7 114299711 114302078 | 101 | hs956 | | | | | | | | | | | | | | |
| 957 | chr2 60761404 60763073 | 102 | hs957 | | | | | | | | x | x | x | x | x | x | |
| 969 | chr2 105317580 105319856 | 103 | hs969 | | | | | | | | x | x | x | x | x | x | |
| 971 | chr5 91970162 91972034 | 104 | hs971 | | | | | | | | | | | | | | |
| 978 | chr6 97754043 97755513 | 105 | hs978 | | | | | | | | | | | | | | x |
| 981 | chr4 113442390 113443530 | 106 | hs981 | | | | | | | | | | | | | | |
| 987 | chr9 128869446 128870934 | 107 | hs987 | | | | | | | | x | x | x | | | | |
| 998 | chr12 103406124 103408154 | 108 | hs998 | | | | | | | | x | x | x | | | | |
| 1006 | chr10 102244842 102246334 | 109 | hs1006 | | | | x | x | x | x | x | x | x | | | | |
| 1007 | chr7 20997668 20999102 | 110 | hs1007 | | | | | | | | | | | | | | |
| 1019 | chr7 20838843 20840395 | 111 | hs1019 | | | | | | | | | | | | | | |
| 1024 | chr5 92312840 92314645 | 112 | hs1024 | | | | | | | | | | | | | | |
| 1025 | chr2 73124730 73126091 | 113 | hs1025 | | | | | x | x | x | x | x | x | x | x | x | |
| 1027 | chr18 22744668 22746270 | 114 | hs1027 | | | | | | | | | | | | | | |
| 1032 | chr10 119309200 119310544 | 115 | hs1032 | | | | | | | | | | | | | | x |
| 1035 | chr6 98074091 98075722 | 116 | hs1035 | | | | | | | | x | x | x | | | | |
| 1041 | chr9 82010246 82011547 | 117 | hs1041 | | | x | | | | | | | | | | | |
| 1050 | chr4 109531908 109533465 | 118 | hs1050 | | | | | x | x | x | x | x | x | | | | |
| 1052 | chr6 18536628 18538267 | 119 | hs1052 | | | | | | | | | | | | | | |
| 1056 | chr18 76481722 76483257 | 120 | hs1056 | | | | | | | | | | | | | | |
| 1060 | chr5 92613862 92616844 | 121 | hs1060 | | | | | | | | | | | | | | |
| 1066 | chr2 63275695 63277103 | 122 | hs1066 | x | x | x | x | x | x | x | x | x | x | | | | |
| 1078 | chr9 82224085 82226757 | 123 | hs1078 | x | x | x | x | x | x | x | | | | | | | |
| 1100 | chr6 41560717 41562075 | 124 | hs1100 | x | x | x | | | | | | | | | | | |
| 1172 | chr5 92634702 92636476 | 125 | hs1172 | x | x | x | x | x | x | x | x | x | x | x | x | x | x |
| 1187 | chr5 50390899 50392257 | 126 | hs1187 | | | | | | | | | | | | | | x |
| 1210 | chr2 66762515 66765088 | 127 | hs1210 | | | | | | | | | | | | | | |
| 1226 | chr7 21080801 21082086 | 128 | hs1226 | | | | | | | | | | | | | | x |
| 1316 | chr3 62405817 62408099 | 129 | hs1316 | | | x | | | | | | | x | | | x | |
| 1318 | chr8 77598007 77600645 | 130 | hs1318 | | | | | | | | (x) | | | (x) | | | (x) |
| 1321 | chr5 50467950 50469989 | 131 | hs1321 | | | | | | | | | | | | | | |
| 1324 | chr1 213498112 213501134 | 132 | hs1324 | | | | | | | | | | | | | | |
| 1325 | chr7 25791903 25794282 | 133 | hs1325 | | | | | | | | x | x | x | x | x | x | x |
| 1329 | chr8 28370867 28371860 | 134 | hs1329 | | | | | x | x | x | | | | | | | |
| 1334 | chr10 37054745 37057224 | 135 | hs1334 | | | | | | | | x | x | x | x | x | x | x |
| 1336 | chr7 34097962 34100011 | 136 | hs1336 | x | x | x | | | | | | | | | | | |
| 1339 | chr9 92292484 92293889 | 137 | hs1339 | x | x | x | | | | | x | x | x | x | x | x | x |
| 1340 | chr6 20867105 20870529 | 138 | hs1340 | | | | | | | | | | | | | | |
| 1341 | chr12 97468703 97471089 | 139 | hs1341 | | | | x | x | x | x | x | x | x | x | x | x | x |
| 1345 | chr5 107299863 107302976 | 140 | hs1345 | | | | | | | | x | x | x | | | | |
| 1358 | chr6 163276830 163279930 | 141 | hs1358 | | | | | | | | x | x | x | x | x | x | |
| 1359 | chr9 84264195 84266950 | 142 | hs1359 | | | | | | | | x | x | x | | | x | |
| 1361 | chr4 153287655 153290517 | 143 | hs1361 | | | x | | | | | | | | | | | |
| 1538 | chr14 36911162 36914360 | 144 | hs1538 | | | | | | | | | | | | | | |
| 1578 | chr2 212254840 212257158 | 145 | hs1578 | | x | x | | | | | | | | | | | |

| | | | | VP | VP | LGE | LGE | LGE | MGE | MGE | MGE | POA | POA | POA | Se | Se | Se |
|---|---|---|---|---|---|---|---|---|---|---|---|---|---|---|---|---|---|
| Element ID | hg19 coordinates | SEQ ID NO: | ID | SVZ | MZ | VZ | SVZ | MZ | VZ | SVZ | MZ | VZ | SVZ | MZ | VZ | SVZ | MZ |
| 12 | chr16 78510608 78511944 | 1 | hs12 | | | | | | | | | | | | | | |
| 22 | chr16 72254566 72255825 | 2 | hs22 | x | x | | | | | | | | | | | | |
| 37 | chr16 54650598 54651882 | 3 | hs37 | | | | | | | | | | | | | | |
| 71 | chr16 51671181 51672039 | 4 | hs71 | | x | | | | | | | | | | | | |
| 110 | chr7 21003280 21004750 | 5 | hs110 | | | | x | x | (x) | x | x | | | | | | |
| 111 | chr7 42191728 42193638 | 6 | hs111 | x | x | x | x | x | x | x | x | x | x | x | x | x | x |
| 112 | chr9 973435 975288 | 7 | hs112 | | | | | | | | | | | | | | |
| 119 | chrX 24915382 24918272 | 8 | hs119 | | | (x) | x | x | | x | x | | | x | | | |
| 121 | chrX 25007879 25009581 | 9 | hs121 | | | (x) | x | x | | x | x | | | | | | x |
| 122 | chrX 25017067 25018756 | 10 | hs122 | x | x | | | | | | | | | | | | |
| 123 | chrX 25400224 25402334 | 11 | hs123 | | | | | | | | | | | | | | |
| 145 | chrX 25018871 25020532 | 12 | hs145 | | | | | | | | | | | | | | |
| 170 | chr2 164450144 164451758 | 13 | hs170 | x | x | | x | x | | x | x | | | | | | |
| 174 | chr1 87821621 87823082 | 14 | hs174 | | x | | | | | | | | | | | | |
| 187 | chr3 71290418 71292584 | 15 | hs187 | | | | | | | | | | | | | | |
| 192 | chr3 180773639 180775802 | 16 | hs192 | | | | | | | | | | | | | | |
| 200 | chr1 51165195 51166786 | 17 | hs200 | x | x | | | | | | | | | | | | |
| 204 | chr1 213597964 213599524 | 18 | hs204 | | | | | x | | x | x | | | x | | | |
| 218 | chr7 114056847 114058647 | 19 | hs218 | | | | | | | | | | | | | | |
| 240 | chr9 83727123 83728378 | 20 | hs240 | x | x | x | x | x | (x) | x | x | | | x | | | |
| 242 | chr2 174114371 174115933 | 21 | hs242 | | | x | x | x | | x | x | | | | | | |
| 244 | chr2 174988737 174990363 | 22 | hs244 | | | | | x | | | x | | | | | | |
| 262 | chr5 76940836 76941396 | 23 | hs262 | | | | | | | | | | | | | | |
| 266 | chr5 87168414 87169433 | 24 | hs266 | x | x | | | | | | | | | | | | |
| 267 | chr5 87239942 87241645 | 25 | hs267 | x | x | x | x | x | x | x | x | | | | x | x | x |
| 268 | chr5 87692154 87693265 | 26 | hs268 | x | x | x | x | x | x | x | x | x | x | x | x | x | x |
| 269 | chr5 90928612 90929226 | 27 | hs269 | | | x | x | | x | x | | | | | | | |
| 271 | chr5 93226985 93228322 | 28 | hs271 | x | x | | | | x | | | | | | | | |
| 281 | chr6 41523224 41523677 | 29 | hs281 | | | | | | | | | | | | | | |
| 293 | chr7 1265154 1266318 | 30 | hs293 | | x | | | | | | | | | | | | |
| 304 | chr9 8095553 8096166 | 31 | hs304 | | | | | x | | | x | | | | | | |
| 312 | chr9 81471747 81473114 | 32 | hs312 | | | | | x | | | x | | | | | | |
| 313 | chr9 81870622 81872224 | 33 | hs313 | | | | | | | | | | | | | | |
| 322 | chr1 87821793 87822910 | 34 | hs322 | | x | | | | | | | | | | | | |
| 342 | chr14 29860529 29862348 | 35 | hs342 | | | x | x | x | x | x | x | | | | | | |
| 348 | chr14 36020024 36020998 | 36 | hs348 | | | | | | | | | | | | x | x | x |
| 388 | chr2 7774393 7775070 | 37 | hs388 | | | | x | x | | | | | | | | | |
| 399 | chr2 60441495 60442515 | 38 | hs399 | | x | | | | | | | | | | | | |
| 408 | chr1 10851570 10852173 | 39 | hs408 | | | | | | | | x | | | | | | |
| 411 | chr2 156726581 156727605 | 40 | hs411 | | | | | | | | | | | | | | |
| 416 | chr2 162094895 162095451 | 41 | hs416 | | | | | | | | | | | | | | |
| 422 | chr2 172955879 172957052 | 42 | hs422 | | | | x | x | | x | x | | | | | | |
| 427 | chrX 139169379 139171545 | 43 | hs427 | x | x | x | | | x | | | | | | x | x | x |
| 433 | chr14 30741750 30743626 | 44 | hs433 | x | x | | x | x | | x | | | | | | | |
| 480 | chr20 30191716 30192554 | 45 | hs480 | | | | | | | | | | | | | | |
| 488 | chr13 95358263 95360017 | 46 | hs488 | x | x | (x) | (x) | (x) | | | | | | | | | |
| 532 | chr13 28395961 28397536 | 47 | hs532 | | | | x | x | (x) | x | x | | | x | | | |
| 540 | chr13 71358093 71359507 | 48 | hs540 | | | | (x) | x | | | | | | | | | |
| 545 | chr1 243876467 243877893 | 49 | hs545 | | | | x | x | | | | | | | | | |
| 550 | chr7 13506207 13507276 | 50 | hs550 | | | | x | x | | x | x | | | | | | |
| 553 | chr2 172936519 172938249 | 51 | hs553 | | | | x | x | | | | | | | | | |
| 565 | chr11 31622822 31624118 | 52 | hs565 | | | | | | | | | | | | | | |
| 566 | chr14 29684896 29686744 | 53 | hs566 | | | | | x | | x | x | | | | | | |
| 582 | chrX 81464240 81465016 | 54 | hs582 | | | | x | x | | x | x | | | | | | |
| 590 | chr18 34719386 34720720 | 55 | hs590 | | | | x | x | | | | | | | | | |
| 595 | chr10 76177765 76179000 | 56 | hs595 | | | | | | | | | | | | | | |
| 599 | chr15 37652783 37654460 | 57 | hs599 | | | | | x | | | | | | | | | |
| 609 | chr2 147172004 147173802 | 58 | hs609 | | | | | | | | | | | | | | |
| 611 | chr12 111495397 111496252 | 59 | hs611 | | | | | | | | | | | | | | |
| 612 | chr1 91305562 91307215 | 60 | hs612 | | | | | | | | | | | | | | |
| 619 | chr13 72333516 72334988 | 61 | hs619 | x | x | x | x | x | x | x | x | x | x | x | | | |
| 622 | chr14 99466200 99467144 | 62 | hs622 | | | | | | | | | | | | | | |
| 631 | chr8 36957851 36958723 | 63 | hs631 | | | | | | | | | | | | | | |
| 632 | chr20 2719208 2719789 | 64 | hs632 | (x) | x | | | | | | | | | | | | |
| 634 | chr18 76006820 76008476 | 65 | hs634 | | | | | | | | | | | | | | |
| 636 | chr3 157882303 157883963 | 66 | hs636 | x | x | | | | | | | | | | | | |
| 643 | chr9 23004730 23005789 | 67 | hs643 | | | | | | | | | | | | | | |
| 649 | chr2 146689050 146690099 | 68 | hs649 | | | | | x | | | x | | | x | | | |
| 653 | chr3 137185964 137186866 | 69 | hs653 | | | | | | | | | | | | | | |
| 654 | chr3 147801015 147802169 | 70 | hs654 | | | | | | | | | | | | | | |
| 656 | chr10 131400948 131402279 | 71 | hs656 | | x | | | | | | | | | | | | |
| 660 | chr15 67198974 67200134 | 72 | hs660 | | | | | | | | | | | | | | |
| 671 | chr1 97610491 97611741 | 73 | hs671 | x | x | | | | | | | | | | | | |
| 672 | chr10 120074039 120075696 | 74 | hs672 | x | x | | | | | | | | | | | | |
| 675 | chr2 144103882 144105644 | 75 | hs675 | | | (x) | (x) | x | | x | | | | | | | |
| 676 | chr6 97544611 97545759 | 76 | hs676 | | | | | | | x | x | | | | | | |
| 687 | chr4 54881222 54882455 | 77 | hs687 | | | x | x | (x) | | | | | | | | | |
| 692 | chr11 15587041 15588314 | 78 | hs692 | | | | | x | x | x | x | x | x | x | | | |
| 702 | chr2 105132815 105133830 | 79 | hs702 | | | | | | | | | | | | | | |
| 742 | chr8 78042571 78044201 | 80 | hs742 | | x | | | | | | | | | | | | |
| 748 | chr10 78390590 78391875 | 81 | hs748 | | | | | (x) | | | (x) | | | | | | |
| 775 | chr18 77010009 77010795 | 82 | hs775 | | | x | | | | | | | | | | | |
| 781 | chr8 21907426 21908282 | 83 | hs781 | | | | | | | | | | | | x | x | x |
| 782 | chr8 21901089 21902326 | 84 | hs782 | | | | | | | | | | | | x | x | x |
| 798 | chr12 16170590 16171824 | 85 | hs798 | | | | | | | | | | | | | | |
| 799 | chr7 9271308 9272358 | 86 | hs799 | | | | | (x) | | x | (x) | | | | | | |
| 807 | chr7 22091362 22092557 | 87 | hs807 | | | | | x | | | | | | | | | |
| 818 | chr9 128520992 128522653 | 88 | hs818 | | x | | | | | | | | | | | | |
| 840 | chr4 66989480 66990366 | 89 | hs840 | x | x | | | | | | | | | | | | |
| 841 | chr10 118854124 118855243 | 90 | hs841 | | | x | x | x | | | | x | x | x | x | x | x |
| 844 | chr7 20832628 20833902 | 91 | hs844 | | | | | | | | | | | | | | |
| 848 | chr16 51491799 51493025 | 92 | hs848 | x | x | x | x | x | | | | | | | | | |
| 852 | chr9 13750115 13751398 | 93 | hs852 | | | | | | | | | | | | | | |
| 853 | chr5 87083012 87084752 | 94 | hs853 | x | x | | | x | | | x | | | | | | |
| 876 | chr9 133540555 133541228 | 95 | hs876 | x | x | | | | | | | | | | | | |
| 886 | chr4 181201559 181202529 | 96 | hs886 | | | | | | | | | | | | | | |
| 914 | chr20 21214790 21217232 | 97 | hs914 | | | | | | | | | | | | | | |
| 921 | chr2 236962599 236964857 | 98 | hs921 | | | | | | | | | | | | | | |
| 952 | chr5 91442456 91444549 | 99 | hs952 | | | | | | | | | | | | | | |
| 953 | chr2 175203263 175204895 | 100 | hs953 | | | | x | x | | | | | | | | | |
| 956 | chr7 114299711 114302078 | 101 | hs956 | | | | x | x | | x | x | | | | | | |
| 957 | chr2 60761404 60763073 | 102 | hs957 | | | | | x | | | x | | | | | | |
| 969 | chr2 105317580 105319856 | 103 | hs969 | | | | | | | | | | | | | | |
| 971 | chr5 91970162 91972034 | 104 | hs971 | | | | | | | | | | | | | | |
| 978 | chr6 97754043 97755513 | 105 | hs978 | x | x | | | | | | | | | | | | |
| 981 | chr4 113442390 113443530 | 106 | hs981 | | | | | | | | | | | | | | |
| 987 | chr9 128869446 128870934 | 107 | hs987 | | | | | | | | | | | | | | |
| 998 | chr12 103406124 103408154 | 108 | hs998 | | | | | | | | | x | x | x | x | x | x |
| 1006 | chr10 102244842 102246334 | 109 | hs1006 | | | | | | | | | | | | | | |
| 1007 | chr7 20997668 20999102 | 110 | hs1007 | | | (x) | x | x | | | | | | | | | |
| 1019 | chr7 20838843 20840395 | 111 | hs1019 | | | x | | | | | | | | | | | |
| 1024 | chr5 92312840 92314645 | 112 | hs1024 | | | | | | | | | | | | | | |
| 1025 | chr2 73124730 73126091 | 113 | hs1025 | | | | | | | | | | | | | | |
| 1027 | chr18 22744668 22746270 | 114 | hs1027 | | | | | | | | | | | | | | |
| 1032 | chr10 119309200 119310544 | 115 | hs1032 | | | x | x | | | | | | | | | | |
| 1035 | chr6 98074091 98075722 | 116 | hs1035 | | | | | | | | | | | | | | |
| 1041 | chr9 82010246 82011547 | 117 | hs1041 | | | | | x | | | x | | | | | | |
| 1050 | chr4 109531908 109533465 | 118 | hs1050 | | | | | | | | | | | | | | |
| 1052 | chr6 18536628 18538267 | 119 | hs1052 | | | | | x | | | | | | x | | | |
| 1056 | chr18 76481722 76483257 | 120 | hs1056 | | | | | | x | x | | x | x | | | | |
| 1060 | chr5 92613862 92616844 | 121 | hs1060 | | | | | | | | x | | | | | | |
| 1066 | chr2 63275695 63277103 | 122 | hs1066 | | | | | | | | | | | | | | |
| 1078 | chr9 82224085 82226757 | 123 | hs1078 | | | | | | | | | | | | | | |
| 1100 | chr6 41560717 41562075 | 124 | hs1100 | | | | | | | | | | | | | | |
| 1172 | chr5 92634702 92636476 | 125 | hs1172 | x | x | x | x | | | | | | | | | | |
| 1187 | chr5 50390899 50392257 | 126 | hs1187 | x | x | x | x | x | x | x | x | | | | | | |
| 1210 | chr2 66762515 66765088 | 127 | hs1210 | | | | | x | | | x | | | | | | |
| 1226 | chr7 21080801 21082086 | 128 | hs1226 | x | x | x | x | x | x | x | x | x | x | x | x | x | x |
| 1316 | chr3 62405817 62408099 | 129 | hs1316 | | x | | | | | | | | | | | | |
| 1318 | chr8 77598007 77600645 | 130 | hs1318 | | | | | | | | | | | | | | |
| 1321 | chr5 50467950 50469989 | 131 | hs1321 | | | | x | x | | x | x | | x | x | | | |
| 1324 | chr1 213498112 213501134 | 132 | hs1324 | | | | | x | | | x | | | | | | |
| 1325 | chr7 25791903 25794282 | 133 | hs1325 | x | x | x | x | x | x | x | x | | | | | | |
| 1329 | chr8 28370867 28371860 | 134 | hs1329 | | | | | | | | | | | | | | |
| 1334 | chr10 37054745 37057224 | 135 | hs1334 | x | x | x | | | x | | | | | | | | |
| 1336 | chr7 34097962 34100011 | 136 | hs1336 | | | x | x | x | | | | | | | | | |
| 1339 | chr9 92292484 92293889 | 137 | hs1339 | x | x | | x | x | | x | x | | | x | | | |
| 1340 | chr6 20867105 20870529 | 138 | hs1340 | | | | x | x | | | x | | | | | | |
| 1341 | chr12 97468703 97471089 | 139 | hs1341 | x | | x | | | x | | | x | | | | | |
| 1345 | chr5 107299863 107302976 | 140 | hs1345 | | | | | | | | | | | | | | |
| 1358 | chr6 163276830 163279930 | 141 | hs1358 | | | | | | | | | | | | | | |
| 1359 | chr9 84264195 84266950 | 142 | hs1359 | | x | | | | | | | | | | | | |
| 1361 | chr4 153287655 153290517 | 143 | hs1361 | | | x | x | x | | x | x | | x | x | | | |
| 1538 | chr14 36911162 36914360 | 144 | hs1538 | | | | | | | | | x | x | x | | | |
| 1578 | chr2 212254840 212257158 | 145 | hs1578 | | | | | | | | | | | | | | |

TABLE 2B

| Enhancer | human coordinates (hg19) | mouse orthologous (mm9) | Additional Comments |
|---|---|---|---|
| hs12 | chr16:78510608-78511944 | chr8:117268335-117269838 | dorsal midline |
| hs22 | chr16:72254566-72255825 | chr8:111960355-111961461 | only ventral parts of DP |
| hs37 | chr16:54650598-54651882 | chr8:94618458-94619728 | sulcus between EMT and CGE continuous with |
| | | | paraventricular area of 3rd ventricle |
| hs71 | chr16:51671181-51672039 | chr8:91988832-91989702 | only rostral |
| hs110 | chr7:21003280-21004750 | chr12:119958141-119959608 | |
| hs111 | chr7:42191728-42193638 | chr13:15634863-15636840 | ventral/rostral/dorsal midline of telencephalon is negative |
| hs112 | chr9:973435-975288 | chr19:25681768-25683668 | |
| hs119 | chrX:24915382-24918272 | chrX:90653081-90655923 | LGE manifold greater than MGE; weak in VZ of LGE |
| hs121 | chrX:25007879-25009581 | chrX:90555103-90556787 | weak in VZ of LGE |
| hs122 | chrX:25017067-25018756 | chrX:90546485-90548137 | |
| hs123 | chrX:25400224-25402334 | chrX:90035076-90037409 | MP: excluded from DG; absent from VZ and SVZ of |
| | | | entorhinal cortex |
| hs145 | chrX:25018871-25020532 | chrX:90544847-90546386 | and prethalamus |
| hs170 | chr2:164450144-164451758 | chr2:63800853-63802473 | |
| hs174 | chr1:87821621-87823082 | chr3:143836652-143838087 | element is an extended region including hs322 |
| hs187 | chr3:71290418-71292584 | chr6:99151224-99153431 | |
| hs192 | chr3:180773639-180775802 | chr3:34002549-34004729 | |
| hs200 | chr1:51165195-51166786 | chr4:109434849-109436376 | |
| hs204 | chr1:213597964-213599524 | chr1:192477619-192479001 | |
| hs218 | chr7:114056847-114058647 | chr6:15137323-15139118 | MP: scattered positive cells, more concentrated towards |
| | | | dentate gyrus. Ventral-dorsal gradient within DP. VZ-MZ |
| | | | gradient throughout cortex. |
| hs240 | chr9:83727123-83728378 | chr4:71144778-71146022 | LGE: negative in ventral |
| hs242 | chr2:174114371-174115933 | chr2:72264212-72265755 | LGE-VZ restricted to dorsal region, MGE-SVZ and MZ |
| | | | present but weak |
| hs244 | chr2:174988737-174990363 | chr2:72980728-72982329 | |
| hs262 | chr5:76940836-76941396 | chr13:95638850-95639388 | paraventricular area (diencephalon only) |
| hs266 | chr5:87168414-87169433 | chr13:84778588-84779575 | |
| hs267 | chr5:87239942-87241645 | chr13:84710013-84711772 | widely expressed throughout CNS; scattered radial clones; |
| | | | common in pallium/cortex; less common in LGE and even |
| | | | less common in MGE |
| hs268 | chr5:87692154-87693265 | chr13:84199108-84200220 | widely expressed throughout CNS; MGE: weak; absent from |
| | | | ventral/dorsal/rostral midline |
| hs269 | chr5:90928612-90929226 | chr13:80762168-80762775 | |
| hs271 | chr5:93226985-93228322 | chr13:78031473-78032794 | mostly (but not exclusively) caudal parts of LGE/MGE |
| | | | scattered radial clones |
| hs281 | chr6:41523224-41523677 | chr17:48051722-48052305 | stronger in MZ; only in the middle (both dorsoventral and |
| | | | rostrocaudal) of DP |
| hs293 | chr7:1265154-1266318 | chr5:140012199-140013382 | MP: only caudally |
| hs304 | chr9:8095553-8096166 | chr4:75346697-75347300 | LGE: ventral only, MGE: dorsal only |
| hs312 | chr9:81471747-81473114 | chr19:15414672-15416040 | |
| hs313 | chr9:81870622-81872224 | chr19:14965044-14966640 | |
| hs322 | chr1:87821793-87822910 | chr3:143836778-143837913 | subregion of hs322; scattered marginal zone cells; common |
| | | | rostrally, rare caudally except caudoventral cortex |
| hs342 | chr14:29860529-29862348 | chr12:51222566-51224516 | in LGE/MGE: rare/scattered radial clones, not homogenous |
| hs348 | chr14:36020024-36020998 | chr12:56715257-56716245 | MP extends into medial prefrontal cortex; apparent tangential |
| | | | migration from septum covering ventrorostral telencephalon |
| hs388 | chr2:7774393-7775070 | chr12:26576441-26577229 | expression possibly extending into dorsal MZ of MGE |
| hs399 | chr2:60441495-60442515 | chr11:24270835-24271855 | only in rostra! region of DP-MZ |
| hs408 | chr1:10851570-10852173 | chr4:148182890-148183525 | |
| hs411 | chr2:156726581-156727605 | chr2:56428876-56429891 | |
| hs416 | chr2:162094895-162095451 | chr2:61494199-61494773 | scattered MZ cells in most parts of cortex, but possibly |
| | | | migrated from EMT |
| hs422 | chr2:172955879-172957052 | chr2:71373435-71374614 | |
| hs427 | chrX: 139169379-139171545 | chrX:57796579-57798664 | subregion of MGE only; ventral Se only |
| hs433 | chr14:30741750-30743626 | chr12:52102388-52104278 | negative in part of DP, strong in MZ and SVZ of LGE and |
| | | | SVZ of MGE |
| hs480 | chr20:30191716-30192554 | chr2:152560612-152561308 | |
| hs488 | chr13:95358263-95360017 | chr14:118628839-118630633 | ventral-dorsal gradient in DP; in VP/LP more mosaic than in |
| | | | high activity region of DP; LP weakly positive and mosaic; |
| | | | MGE and POA very few scattered positive cells; rostral-most |
| | | | septal area positive, but definitive septal area negative |
| hs532 | chr13:28395961-28397536 | chr5:148034236-148035797 | MGE-VZ: scattered cells; MGE: rostral dorsal only |
| hs540 | chr13:71358093-71359507 | chr14:97500095-97501460 | dorsal LGE only |
| hs545 | chr1:243876467-243877893 | chr1:179080168-179081586 | |
| hs550 | chr7:13506207-13507276 | chr12:40027691-40028748 | possibly extending into POA |
| hs553 | chr2:172936519-172938249 | chr2:71354541-71356276 | within caudal part of LGE only dorsal |
| hs565 | chr11:31622822-31624118 | chr2:105673544-105674854 | |
| hs566 | chr14:29684896-29686744 | chr12:51045696-51047526 | |
| hs582 | chrX:81464240-81465016 | chrX:107040272-107041048 | |
| hs590 | chr18:34719386-34720720 | chr18:25535871-25537147 | |
| hs595 | chr10:76177765-76179000 | chr14:22071224-22072450 | PFC dorsal, not ventral |
| hs599 | chr15:37652783-37654460 | chr2:116149138-116150802 | |
| hs609 | chr2:147172004-147173802 | chr2:47039102-47040857 | active in diencephalon only |
| hs611 | chr12:111495397-111496252 | chr5:122482511-122483364 | CP mosaic |
| hs612 | chr1:91305562-91307215 | chr5:106993349-106995037 | mosaic in telencephalic areas |
| hs619 | chr13:72333516-72334988 | chr14:98471700-98473200 | LGE- and MGE-MZs show complex pattern |
| hs622 | chr14:99466200-99467144 | chr12:109016128-109017121 | scattered cells in DP-VZ |
| hs631 | chr8:36957851-36958723 | chr8:27495259-27496119 | possibly extending into DP |
| hs632 | chr20:2719208-2719789 | chr2:130177541-130178125 | small lateral zone of PFC |
| hs634 | chr18:76006820-76008476 | chr18:81705917-81707509 | |
| hs636 | chr3:157882303-157883963 | chr3:66839929-66841573 | |
| hs643 | chr9:23004730-23005789 | chr4:90103989-90105031 | small region of MP, probably missing dentate gyrus and |
| | | | subiculum |
| hs649 | chr2:146689050-146690099 | chr2:46521795-46522893 | possibly some SVZ cells are positive in these areas |
| hs653 | chr3:137185964-137186866 | chr9:100031290-100032189 | MP-expression locally restricted; likely subiculum |
| hs654 | chr3:147801015-147802169 | chr9:90587647-90588760 | |
| hs656 | chr10:131400948-131402279 | chr7:144193692-144194957 | VP rostrally and caudally separated by a gap; tangential |
| | | | migration emanating out from both rostral and caudal sources |
| hs660 | chr15:67198974-67200134 | chr9:63728005-63729314 | cannot be descibed with existing annotation scheme; likely |
| | | | entorhinal cortex precursor region |
| hs671 | chr1:97610491-97611741 | chr3:119064359-119065611 | DP predominantly in ventral half |
| hs672 | chr10:120074039-120075696 | chr19: 60278961-60280625 | |
| hs675 | chr2:144103882-144105644 | chr2:43833258-43835027 | LGE-VZ/SVZ only in scattered cells |
| hs676 | chr6:97544611-97545759 | chr4:24596353-24597477 | expression in LGE-MZ has appearance of tangential |
| | | | migration from MGE |
| hs687 | chr4:54881222-54882455 | chr5:75408486-75409693 | |
| hs692 | chr11:15587041-15588314 | chr7:122274934-122276253 | LGE-MZ possibly dorsal migration from the MGE |
| hs702 | chr2:105132815-105133830 | chr1:42422613-42423612 | cells in MZ of ventral and medial pallium likely tangential |
| | | | migration from EMT |
| hs742 | chr8:78042571-78044201 | chr3:5754492-5756119 | |
| hs748 | chr10:78390590-78391875 | chr14:23913849-23915139 | MZ cells straddle the ventral LGE and dorsal MGE |
| hs775 | chr18:77010009-77010795 | chr18:81008176-81008914 | mosaic in VP; LGE is scattered and mosaic; only dorsal LGE |
| | | | where expression is stronger in VP than dorsal LGE; absent |
| | | | from PFC and caudal telencephalon |
| hs781 | chr8:21907426-21908282 | chr14:71034305-71035125 | EMT: rostral only |
| hs782 | chr8:21901089-21902326 | chr14:71039797-71041000 | |
| hs798 | chr12:16170590-16171824 | chr6:137772070-137773298 | MP only caudally |
| hs799 | chr7:9271308-9272358 | chr6:9784714-9785886 | MZ cells straddle the ventral LGE and dorsal MGE, but also |
| | | | expression in the dorsal MGE-SVZ |
| hs807 | chr7:22091362-22092557 | chr12:119044146-119045319 | |
| hs818 | chr9:128520992-128522653 | chr2:34214751-34216394 | |
| hs840 | chr4:66989480-66990366 | chr5:85240355-85241286 | |
| hs841 | chr10:118854124-118855243 | chr19:59207451-59208587 | ventral LGE only; possibly also activity in most rostral MGE |
| hs844 | chr7:20832628-20833902 | chr12:120078517-120079917 | apparent tangential migration from EMT into MZ of entorhinal |
| | | | cortex and subiculum; dorsal pallial domain likely separate |
| | | | from EMT; mosaic in DP, dorsal-ventral gradient |
| hs848 | chr16:51491799-51493025 | chr8:91847783-91849077 | |
| hs852 | chr9:13750115-13751398 | chr4:81606321-81607769 | |
| hs853 | chr5:87083012-87084752 | chr13:84890969-84892679 | LGE-MZ and MGE-MZ may be tangentially migrating cells |
| hs876 | chr9:133540555-133541228 | chr2:31496164-31496831 | |
| hs886 | chr4:181201559-181202529 | chr8:51793522-51794489 | |
| hs914 | chr20:21214790-21217232 | chr2:146783502-146786549 | activity in diencephalon only |
| hs921 | chr2:236962599-236964857 | chr1:91744283-91746520 | MZ in caudal ventral cortex likely tangential migration from |
| | | | EMT |
| hs952 | chr5:91442456-91444549 | chr13:80138929-80141010 | caudal part of EMT likely migration to MZ of caudal ventral |
| | | | cortex; in MP dentate gyrus-like appearance |
| hs953 | chr2:175203263-175204895 | chr2:73113651-73115241 | dorsal LGE only |
| hs956 | chr7:114299711-114302078 | chr6:15361326-15363759 | both LGE and MGE dorsal only |
| hs957 | chr2:60761404-60763073 | chr11:23995054-23996665 | entorhinal cortex positive |
| hs969 | chr2:105317580-105319856 | chr1:42595564-42597875 | DP ventral-dorsal; LP mosaic |
| hs971 | chr5:91970162-91972034 | chr13:79484078-79485978 | activity in diencephalon only |
| hs978 | chr6:97754043-97755513 | chr4:24356000-24357444 | VP: rostral domain only, extends into PFC; moderate |
| | | | tangential migration |
| hs981 | chr4:113442390-113443530 | chr3:127329759-127330822 | activity in diencephalon only |
| hs987 | chr9:128869446-128870934 | chr2:33920352-33922048 | MZ positive in piriform cortex, accumbens and pallidum; |
| | | | origin of probable tangential migration unknown |
| hs998 | chr12:103406124-103408154 | chr10:86909379-86911404 | DP only positive in frontal cortex |
| hs1006 | chr10:102244842-102246334 | chr19:44588622-44590360 | expression mosaic, dorsal-ventral gradient in DP |
| hs1007 | chr7:20997668-20999102 | chr12:119963922-119965376 | |
| hs1019 | chr7:20838843-20840395 | chr12:120072953-120074549 | only dorsal-most portion of rostral LGE |
| hs1024 | chr5:92312840-92314645 | chr13:79076503-79078270 | frontal midline mesenchyme; probably meninges with no |
| | | | activity in actual brain |
| hs1025 | chr2:73124730-73126091 | chr6:85114949-85116468 | LP mosaic |
| hs1027 | chr18:22744668-22746270 | chr18:13945304-13946949 | mesenchyme under ventrolateral surface of telencephalon, |
| | | | no activity in actual brain |
| hs1032 | chr10:119309200-119310544 | chr19:59539995-59541288 | in VP, very mosaic and weak, maybe also in LP; in LGE only |
| | | | dorsal |
| hs1035 | chr6:98074091-98075722 | chr4:23945964-23947393 | rostral DP; dorsal-ventral gradient; mosaic |
| hs1041 | chr9:82010246-82011547 | chr19:14851206-14852476 | MZ of MP and VP likely tangentially migrating cells from EMT |
| hs1050 | chr4:109531908-109533465 | chr3:130439998-130441481 | MP dorsal only, dentate gyrus likely negative; DP dorsal only; |
| | | | clear intracortical boundary; dorsal-ventral gradient in DP |
| hs1052 | chr6:18536628-18538267 | chr13:47405953-47407586 | POA: small subregion; rostral-most sections unavailable, may |
| | | | extend into septum |
| hs1056 | chr18:76481722-76483257 | chr18:81349711-81351278 | within MGE only ventral with ventral-dorsal gradient; POA |
| | | | dorsal only; possibly few MZ cells in MGE and POA |
| hs1060 | chr5:92613862-92616844 | chr13:78740226-78743005 | |
| hs1066 | chr2:63275695-63277103 | chr11:21902483-21903827 | possibly extending into LP/VP; caudal-to-rostral and likely |
| | | | also dorsal-to-ventral gradient in pallium |
| hs1078 | chr9:82224085-82226757 | chr19:14639785-14642658 | EMT rostral only |
| hs1100 | chr6:41560717-41562075 | chr17:48008828-48010025 | EMT caudal only; cells in caudal MP-MZ and DP-MZ likely |
| | | | migrating from EMT |
| hs1172 | chr5:92634702-92636476 | chr13:78719845-78721773 | caudal-rostral and ventral-dorsal gradient |
| hs1187 | chr5:50390899-50392257 | chr13:117364725-117366094 | MGE dorsal only |
| hs1210 | chr2:66762515-66765088 | chr11:18816167-18818733 | MGE-MZ cells may have migrated from LGE to MGE |
| hs1226 | chr7:21080801-21082086 | chr12:119888961-119890205 | mosaic throughout; ventral PFC positive, probably from VP |
| | | | expression; expression in diencephalon (SPV) leading to |
| | | | migration of cells into amygdala |
| hs1316 | chr3:62405817-62408099 | chr14:13225035-13227325 | in EMT only caudal/ventral and possibly producing neurons |
| | | | migrating into caudal ventral pallium |
| hs1318 | chr8:77598007-77600645 | chr3:5223534-5226222 | rostral-most pole only |
| hs1321 | chr5:50467950-50469989 | chr13:117304210-117306202 | in LGE, MGE, POA possibly some VZ cells |
| hs1324 | chr1:213498112-213501134 | chr1:192551182-192554052 | |
| hs1325 | chr7:25791903-25794282 | chr6:51026185-51028597 | mosaic throughout; within DP, ventral-dorsal gradient |
| hs1329 | chr8:28370867-28371860 | chr14:65863910-65865029 | rostrally expression extends to VZ of DP/LP (“bulls-eye” |
| | | | pattern) |
| hs1334 | chr10:37054745-37057224 | chr18:8043681-8045850 | positive in rostral-most LGE only; MGE positive in |
| | | | intermediate dorsal-ventral position |
| hs1336 | chr7:34097962-34100011 | chr9:23182371-23184296 | EMT caudal-ventral only; may contribute cells to |
| | | | caudal/ventral pallium and/or CGE |
| hs1339 | chr9:92292484-92293889 | chr13:52015574-52016990 | MGE-MZ/-SVZ rostral/dorsal |
| hs1340 | chr6:20867105-20870529 | chr13:29701055-29703698 | MGE expression possibly originating from ventral migration |
| | | | from LGE |
| hs1341 | chr12:97468703-97471089 | chr10:92018471-92020553 | MP rostral only; absent in dorsal DP; MGE rostral only; POA |
| | | | very weak |
| hs1345 | chr5:107299863-107302976 | chr17:63520771-63522886 | novel domain in area of lateral entorhinal cortex; DP dorsal- |
| | | | vental gradient and rostral-caudal gradient; intraneocortical |
| | | | boundaries |
| hs1358 | chr6:163276830-163279930 | chr17:10936792-10939045 | |
| hs1359 | chr9:84264195-84266950 | chr4:71827361-71829994 | predominantly MZ expression |
| hs1361 | chr4:153287655-153290517 | chr3:84741019-84743495 | EMT caudal-ventral, contributing to MZ of ventral cortex |
| | | | and/or CGE |
| hs1538 | chr14:36911162-36914360 | chr12:57559065-57561475 | possibly also MGE |
| hs1578 | chr2:212254840-212257158 | chr1:68092503-68094701 | few cells in ventral caudal pallium; likely from EMT |

TABLE 3
Genomic intervals surrounding known telencephalon genes scanned for enhancers

| | sequence | | | |
|---|---|---|---|---|
| | coordinates (hg19) | | | |
| gene | chr | start | end | Elements tested in transgenics |
| ASCL1 | chr12 | 103311381 | 103695720 | hs1122, hs1114, hs1540, hs998, hs967, hs1575 |
| BCL11A | chr2 | 58468514 | 60983381 | hs1076, hs1174, hs1012, hs1071, hs1018, |
| | | | | hs1090, hs1063, hs1152, hs1232, hs1067, |
| | | | | hs1199, hs1077, hs1154, hs1143, hs975, |
| | | | | hs1119, |
| | | | | hs1057, hs1209, hs1204, hs1021, hs1164, |
| | | | | hs1072, hs1120, hs1535, hs1111, hs957, |
| | | | | hs1176, hs1142, hs1113, hs1196, hs1181 |
| BMP4 | chr14 | 53620000 | 54863712 | hs1151 |
| CUTL2 | chr12 | 111375255 | 111798483 | |
| EBF1 | chr5 | 157286168 | 158526749 | hs1130, hs1208, hs1137, hs1022, hs1117, |
| | | | | hs1123 |
| EMX1 | chr2 | 73119286 | 73169165 | hs1025 |
| EMX2 | chr10 | 119134937 | 119764428 | hs1032, hs1221, hs1087, hs1236, hs1551 |
| EOMES | chr3 | 27498245 | 28283123 | hs1557 |
| ERBB4 | chr2 | 211543829 | 213870762 | hs1578, hs1207, hs1541 |
| ETV1 | chr7 | 13935433 | 14187244 | |
| ETV5 | chr3 | 185655818 | 185867011 | |
| FEZF2 | chr3 | 62319321 | 62384021 | |
| FGF10 | chr5 | 43705589 | 44809026 | |
| FGF17 | chr8 | 21894407 | 21911155 | hs782, hs781 |
| FGF19 | chr11 | 69490165 | 69587796 | |
| FGF8 | chr10 | 103454743 | 103541082 | |
| FGFR3 | chr4 | 1746895 | 1814759 | |
| FOXG1 | chr14 | 27066960 | 30045688 | hs1127, hs1075, hs1064, hs1539, hs1168, |
| | | | | hs1523, hs1193, hs1201, hs1062 |
| FOXP1 | chr3 | 70666812 | 71731877 | hs1214, hs1231, hs965, hs1092, hs187, hs1116, |
| | | | | hs973, hs1149, hs1010, hs1572, hs1160, hs997 |
| FOXP2 | chr7 | 113559064 | 114562208 | hs1069, hs1167, hs999, hs954, hs1215, hs956, |
| | | | | hs1192, hs1080, hs966 |
| FOXP4 | chr6 | 41318615 | 41606252 | hs1225, hs1145, hs1100, hs1003 |
| FZD8 | chr10 | 35897863 | 37414784 | hs1588, hs1567, hs1589 |
| GAD1 | chr2 | 171574497 | 171785710 | |
| GBX1 | chr7 | 150841523 | 150872784 | |
| GBX2 | chr2 | 237033863 | 237102094 | |
| GLI1 | chr12 | 57851789 | 57866095 | |
| GLI3 | chr7 | 41742706 | 42949220 | hs1586, hs1132, hs1213 |
| GSH1 | chr13 | 28241547 | 28494176 | hs1568 |
| GSH2 | chr4 | 54934356 | 55092588 | |
| HES1 | chr3 | 193415315 | 194060494 | hs1563, hs1543 |
| HES5 | chr1 | 2458036 | 2485433 | |
| HMX3 | chr10 | 124817805 | 124913869 | hs1005 |
| ID2 | chr2 | 8468549 | 8869059 | hs1527 |
| ID4 | chr6 | 18468848 | 20100947 | hs1052, hs1580, hs1094, hs1542, hs1533, |
| | | | | hs1175 |
| IKFZ1 | chr7 | 50136049 | 50509959 | hs961, hs972 |
| ISL1 | chr5 | 50138176 | 50690328 | hs1187 |
| LEF1 | chr4 | 108956323 | 109541811 | hs1545, hs1050 |
| LHX2 | chr9 | 126692417 | 127020242 | |
| LHX5 | chr12 | 113876080 | 114259862 | hs1571 |
| LHX6 | chr9 | 124962361 | 125003783 | |
| LHX8 | chr1 | 75232358 | 75669297 | |
| LMO3 | chr12 | 16517343 | 18233803 | hs1532, hs993, hs980 |
| LMO4 | chr1 | 87634884 | 89150255 | hs1134, hs174, hs1161, hs1217, hs1002, |
| | | | | hs1058, hs1055, hs1198, hs1200, hs1135, |
| | | | | hs1216, hs1068, hs988, hs1107 |
| MAFB | chr20 | 37668363 | 39657461 | hs1042, hs1237, hs1086, hs1234, hs1101, |
| | | | | hs996, hs992 |
| MEIS1 | chr2 | 66311772 | 67624450 | hs1229, hs1110, hs1206, hs1197, hs1584, |
| | | | | hs1565, hs1210 |
| MEIS2 | chr15 | 37102447 | 37392754 | hs1129, hs1178, hs1097 |
| NEUROG1 | chr5 | 134783038 | 134906374 | |
| NEUROG2 | chr4 | 113362829 | 113460499 | hs981 |
| NKX2-2 | chr20 | 21370463 | 22380988 | hs1205 |
| NR2E1 | chr6 | 108395941 | 108532717 | hs1033, hs1189 |
| NR2F1 | chr5 | 90679121 | 92936062 | hs989, hs982, hs1227, hs952, hs1084, hs1162, |
| | | | | hs1109, hs971, hs1039, hs1155, hs1079, |
| | | | | hs1153, hs1024, hs1049, hs1146, hs1560, |
| | | | | hs1170, hs1060, hs1550, hs1034, hs1577, |
| | | | | hs1172, hs1222 |
| OLIG2 | chr21 | 34185959 | 34442449 | hs1548, hs1188 |
| OTX1 | chr2 | 63273619 | 63344985 | hs1066 |
| OTX2 | chr14 | 57115002 | 57670114 | hs1579, hs1150, hs1218 |
| PAX6 | chr11 | 31805329 | 32112607 | hs1531, hs1082 |
| PBX1 | chr1 | 163325547 | 165172647 | hs1156, hs1185, hs1230, hs1202, hs1235, |
| | | | | hs1144, hs970, hs1136, hs1191 |
| PBX2 | chr6 | 32152023 | 32158543 | |
| PBX3 | chr9 | 128508831 | 129089127 | hs1030, hs818, hs1102, hs983, hs1099, hs1095, |
| | | | | hs1017, hs1000, hs1103, hs987, hs1015, hs1108 |
| POU3F1 | chr1 | 38489494 | 39305020 | hs1105, hs1124, hs1179, hs1001, hs1008, |
| | | | | hs1098, hs1045, hs1546, hs1031, hs1139 |
| POU3F2 | chr6 | 97731052 | 99321600 | hs978, hs1564, hs1059, hs1220, hs1054, hs995, |
| | | | | hs985, hs1233, hs1106, hs1128, hs1159, |
| | | | | hs1081, hs1014, hs1035, hs1085 |
| POU3F3 | chr2 | 103433878 | 105654505 | hs1212, hs1125, hs1581, hs1112, hs1555, |
| | | | | hs958, hs977, hs1147, hs1526, hs1126, hs1140, |
| | | | | hs1554, hs1131, hs1534, hs960, hs1177, hs969, |
| | | | | hs1121, hs1553, hs990, hs1093, hs1529 |
| POU3F4 | chrX | 82763251 | 83319284 | hs1029 |
| RARB | chr3 | 25469704 | 25639474 | |
| RARG | chr12 | 53601000 | 53645436 | |
| SALL3 | chr18 | 74982093 | 76829396 | hs1195, hs1186, hs1047, hs1083, hs1011, |
| | | | | hs1056, hs1194, hs1141, hs1020 |
| SIX3 | chr2 | 45149606 | 45232343 | |
| SLC32A1 | chr20 | 37217104 | 37377096 | |
| SP8 | chr7 | 20795247 | 21467688 | hs1019, hs1007, hs1226, hs1223, hs1148 |
| SP9 | chr2 | 175113365 | 175212879 | hs953 |
| SPRY1 | chr4 | 124235802 | 125585467 | hs1582, hs1525 |
| TBR1 | chr2 | 162267926 | 162290384 | |
| TCF4 | chr18 | 52626637 | 53255493 | hs1013, hs1561, hs1537 |
| TITF1 | chr14 | 36841574 | 36989414 | hs984, hs1166, hs1538 |
| TLE4 | chr9 | 82006948 | 84198598 | hs1041, hs1074, hs1078, hs1026, hs1183, |
| | | | | hs1587, hs1004, hs1211, hs974, hs1228, |
| | | | | hs1118, hs1163 |
| VAX1 | chr10 | 118764876 | 118934608 | hs841 |
| WNT7B | chr22 | 46239929 | 46436457 | hs1559 |
| WNT8B | chr10 | 102124587 | 102246402 | hs1006 |
| ZIC1 | chr3 | 147124407 | 148415664 | hs1043, hs1173, hs1184, hs1573, hs1038, |
| | | | | hs1549, hs1203, hs1115, hs1224 |
| ZNF521 | chr18 | 22059920 | 23596218 | hs1053, hs1169, hs1180, hs1104, hs1027, |
| | | | | hs962, hs1088, hs1544, hs1138, hs1566 |

TABLE 4

| | | | | extremely |
|---|---|---|---|---|
| | Near | | | human-rodent |
| | forebrain | | Vertebrate | conserved |
| | gene | Neighboring | PhastCons | (Visel et al |
| tested element (hg19) | (see Table 3) | Genes | Score | 2008) |
| chr12:103345263-103346680 | ASCL1 | PAH, ASCL1 | 797 | yes |
| chr12:103371347-103372610 | ASCL1 | ASCL1, C12orf42 | 801 | yes |
| chr12:103570982-103573398 | ASCL1 | ASCL1, C12orf42 | 639 | yes |
| chr12:103484342-103485519 | ASCL1 | ASCL1, C12orf42 | 812 | yes |
| chr2:58695819-58697323 | BCL11A | FANCL, BCL11A | 846 | yes |
| chr2:58748340-58750140 | BCL11A | FANCL, BCL11A | 771 | yes |
| chr2:58770304-58771290 | BCL11A | FANCL, BCL11A | 859 | yes |
| chr2:58799729-58800607 | BCL11A | FANCL, BCL11A | 701 | yes |
| chr2:58809796-58811611 | BCL11A | FANCL, BCL11A | 832 | yes |
| chr2:58811475-58812905 | BCL11A | FANCL, BCL11A | 771 | yes |
| chr2:58857680-58858956 | BCL11A | FANCL, BCL11A | 854 | yes |
| chr2:58859997-58861674 | BCL11A | FANCL, BCL11A | 850 | yes |
| chr2:58891096-58892548 | BCL11A | FANCL, BCL11A | 846 | yes |
| chr2:58948607-58950015 | BCL11A | FANCL, BCL11A | 852 | yes |
| chr2:58975738-58977115 | BCL11A | FANCL, BCL11A | 845 | yes |
| chr2:59102071-59103380 | BCL11A | FANCL, BCL11A | 750 | yes |
| chr2:59161996-59164461 | BCL11A | FANCL, BCL11A | 819 | yes |
| chr2:59178992-59180242 | BCL11A | FANCL, BCL11A | 772 | yes |
| chr2:59202276-59203399 | BCL11A | FANCL, BCL11A | 825 | yes |
| chr2:59203217-59204548 | BCL11A | FANCL, BCL11A | 827 | yes |
| chr2:59303870-59305029 | BCL11A | FANCL, BCL11A | 838 | yes |
| chr2:59304974-59306893 | BCL11A | FANCL, BCL11A | 873 | yes |
| chr2:59888700-59891476 | BCL11A | FANCL, BCL11A | 833 | yes |
| chr2:59894793-59896957 | BCL11A | FANCL, BCL11A | 785 | yes |
| chr2:59896819-59898978 | BCL11A | FANCL, BCL11A | 779 | yes |
| chr2:59998338-59999656 | BCL11A | FANCL, BCL11A | 805 | yes |
| chr2:60005531-60007545 | BCL11A | FANCL, BCL11A | 791 | yes |
| chr2:60055628-60056970 | BCL11A | FANCL, BCL11A | 842 | yes |
| chr2:60223849-60225179 | BCL11A | FANCL, BCL11A | 788 | yes |
| chr2:60516097-60518092 | BCL11A | FANCL, BCL11A | 839 | yes |
| chr2:60794812-60796264 | BCL11A | BCL11A, PAPOLG | 782 | yes |
| chr2:60855056-60856888 | BCL11A | BCL11A, PAPOLG | 844 | yes |
| chr14:53833457-53836210 | BMP4 | DDHD1, BMP4 | 782 | yes |
| chr5:157589029-157590477 | EBF1 | CLINT1, EBF1 | 832 | yes |
| chr5:158017768-158019067 | EBF1 | CLINT1, EBF1 | 808 | yes |
| chr5:158227696-158229500 | EBF1 | EBF1 | 814 | yes |
| chr5:158517785-158518914 | EBF1 | EBF1 | 788 | yes |
| chr5:158486120-158487498 | EBF1 | EBF1 | 830 | yes |
| chr5:158508842-158510137 | EBF1 | EBF1 | 809 | yes |
| chr10:119313709-119314860 | EMX2 | EMX2, RAB11FIP2 | 786 | yes |
| chr10:119491936-119493137 | EMX2 | EMX2, RAB11FIP2 | 793 | yes |
| chr10:119589659-119591176 | EMX2 | EMX2, RAB11FIP2 | 796 | yes |
| chr3:28033828-28035751 | EOMES | AK297461, CMC1 | 824 | yes |
| chr2:213141079-213142308 | ERBB4 | ERBB4 | 767 | yes |
| chr8:21907426-21908282 | FGF17 | FGF17, EPB49 | 590 | no |
| chr8:21901089-21902326 | FGF17 | FGF17 | 612 | yes |
| chr2:175203263-175204895 | FLJ46347 | SP9, CIR1 | 889 | yes |
| chr14 :27553786-27555661 | FOXG1 | NOVA1, FOXG1 | 728 | yes |
| chr14 :28398563-28400621 | FOXG1 | NOVA1, FOXG1 | 733 | yes |
| chr14:29743374-29745881 | FOXG1 | C14orf23, PRKD1 | 782 | yes |
| chr14:29894197-29895582 | FOXG1 | C14orf23, PRKD1 | 750 | yes |
| chr14:29911320-29912514 | FOXG1 | C14orf23, PRKD1 | 770 | yes |
| chr14:29960491-29962005 | FOXG1 | C14orf23, PRKD1 | 773 | yes |
| chr14:29226075-29227673 | FOXG1 | NOVA1, FOXG1 | 806 | yes |
| chr3:70701489-70702904 | FOXP1 | MITF, FOXP1 | 741 | yes |
| chr3:71026229-71026764 | FOXP1 | FOXP1 | 810 | yes |
| chr3:71099157-71100851 | FOXP1 | FOXP1 | 931 | yes |
| chr3:71253670-71255013 | FOXP1 | FOXP1 | 825 | yes |
| chr3:71446827-71448809 | FOXP1 | FOXP1 | 784 | yes |
| chr3:71499477-71500970 | FOXP1 | FOXP1 | 843 | yes |
| chr3:71507469-71508874 | FOXP1 | FOXP1 | 844 | yes |
| chr3:71573607-71574540 | FOXP1 | FOXP1 | 833 | yes |
| chr3:71590897-71592786 | FOXP1 | FOXP1 | 818 | yes |
| chr3:71153556-71155053 | FOXP1 | FOXP1 | 826 | yes |
| chr7:114052100-114053403 | FOXP2 | FOXP2 | 800 | yes |
| chr7:114055419-114056748 | FOXP2 | FOXP2 | 820 | yes |
| chr7:114142132-114143527 | FOXP2 | FOXP2 | 885 | yes |
| chr7:114261073-114263089 | FOXP2 | FOXP2 | 875 | yes |
| chr7:114287987-114290557 | FOXP2 | FOXP2 | 905 | yes |
| chr7:114292900-114293972 | FOXP2 | FOXP2 | 800 | yes |
| chr7:114326912-114329772 | FOXP2 | FOXP2 | 892 | yes |
| chr7:114463797-114464462 | FOXP2 | FOXP2, MDFIC | 820 | yes |
| chr7:114299711-114302078 | FOXP2 | FOXP2 | 905 | yes |
| chr6:41380559-41381515 | FOXP4 | NCR2, DQ141194 | 603 | yes |
| chr6:41434455-41435695 | FOXP4 | NCR2, DQ141194 | 815 | yes |
| chr6:41436815-41438024 | FOXP4 | NCR2, DQ141194 | 760 | yes |
| chr6:41560717-41562075 | FOXP4 | FOXP4 | 809 | yes |
| chr10:36072272-36074291 | FZD8 | FZD8, ANKRD30A | 428 | no |
| chr10:35925382-35927242 | FZD8 | FZD8 | 748 | yes |
| chr7:42432266-42433365 | GLI3 | GLI3, C7orf25 | 678 | yes |
| chr7:42252831-42254560 | GLI3 | GLI3 | 818 | yes |
| chr13:28318579-28320134 | GSH1 | POLR1D, GSX1 | 783 | no |
| chr10:124902927-124904638 | Hmx3 | HMX3, HMX2 | 831 | yes |
| chr6:18612650-18614840 | ID4 | RNF144B, ID4 | 688 | no |
| chr7:50333048-50334464 | IKFZ1 | C7orf72, IKZF1 | 726 | yes |
| chr7:50357638-50358644 | IKFZ1 | IKZF1 | 823 | yes |
| chr4:109531908-109533465 | LEF1 | LOC285456 | 753 | yes |
| chr12:17311784-17313759 | LMO3 | SKP1P2, RERGL | 808 | yes |
| chr12:17848111-17849347 | LMO3 | SKP1P2, RERGL | 823 | yes |
| chr1:88183654-88184961 | LMO4 | LMO4, PKN2 | 815 | yes |
| chr1:88402821-88404888 | LMO4 | LMO4, PKN2 | 842 | yes |
| chr1:88535719-88538390 | LMO4 | LMO4, PKN2 | 807 | yes |
| chr1:88577535-88578821 | LMO4 | LMO4, PKN2 | 728 | yes |
| chr1:88595049-88596320 | LMO4 | LMO4, PKN2 | 786 | yes |
| chr1:88646698-88648145 | LMO4 | LMO4, PKN2 | 846 | yes |
| chr1:88686076-88687740 | LMO4 | LMO4, PKN2 | 829 | yes |
| chr1:88841735-88843091 | LMO4 | LMO4, PKN2 | 832 | yes |
| chr1:88875731-88877192 | LMO4 | LMO4, PKN2 | 876 | yes |
| chr1:88025863-88027203 | LMO4 | LMO4, PKN2 | 767 | yes |
| chr20:37876814-37877600 | MAFB | DHX35, MAFB | 771 | yes |
| chr20:38580899-38582010 | MAFB | DHX35, MAFB | 681 | yes |
| chr20:38862746-38864025 | MAFB | DHX35, MAFB | 816 | yes |
| chr20:39334182-39335059 | MAFB | MAFB, TOP1 | 815 | yes |
| chr20:39347264-39348213 | MAFB | MAFB, TOP1 | 784 | yes |
| chr20:39472648-39473702 | MAFB | MAFB, TOP1 | 747 | yes |
| chr20:39483347-39484593 | MAFB | MAFB, TOP1 | 767 | yes |
| chr2:67414599-67416139 | MEIS1 | MEIS1, ETAA1 | 636 | no |
| chr2:66397542-66398943 | MEIS1 | SPRED2, MEIS1 | 830 | yes |
| chr2:66510556-66511795 | MEIS1 | SPRED2, MEIS1 | 802 | yes |
| chr2:66749539-66750931 | MEIS1 | MEIS1 | 864 | yes |
| chr15:37216993-37219601 | MEIS2 | MEIS2 | 869 | yes |
| chr15:37347604-37349955 | MEIS2 | MEIS2 | 876 | yes |
| chr15:37371729-37373137 | MEIS2 | MEIS2 | 849 | yes |
| chr4:113442390-113443530 | NEUROG2 | NEUROG2, C4orf21 [symbol] | 819 | yes |
| chr20:21488551-21490021 | NKX2-2 | NKX2-4, NKX2-2 | 762 | yes |
| chr6:108435330-108436506 | NR2E1 | OSTM1, NR2E1 | 787 | yes |
| chr5:90768370-90769843 | NR2F1 | ARRDC3, NR2F1 | 775 | yes |
| chr5:90785763-90787167 | NR2F1 | ARRDC3, NR2F1 | 812 | yes |
| chr5:91271776-91272886 | NR2F1 | ARRDC3, NR2F1 | 765 | yes |
| chr5:91700124-91701467 | NR2F1 | ARRDC3, NR2F1 | 736 | yes |
| chr5:91765018-91766129 | NR2F1 | ARRDC3, NR2F1 | 734 | yes |
| chr5:91828131-91829295 | NR2F1 | ARRDC3, NR2F1 | 738 | yes |
| chr5:91940922-91942042 | NR2F1 | ARRDC3, NR2F1 | 760 | yes |
| chr5:92031088-92033197 | NR2F1 | ARRDC3, NR2F1 | 803 | yes |
| chr5:92035493-92036961 | NR2F1 | ARRDC3, NR2F1 | 813 | yes |
| chr5:92141511-92143537 | NR2F1 | ARRDC3, NR2F1 | 841 | yes |
| chr5:92219848-92221133 | NR2F1 | ARRDC3, NR2F1 | 764 | yes |
| chr5:92314781-92316083 | NR2F1 | ARRDC3, NR2F1 | 837 | yes |
| chr5:92426546-92428433 | NR2F1 | ARRDC3, NR2F1 | 803 | yes |
| chr5:92476842-92479105 | NR2F1 | ARRDC3, NR2F1 | 657 | yes |
| chr5:92526066-92527353 | NR2F1 | ARRDC3, NR2F1 | 806 | yes |
| chr5:92536353-92537380 | NR2F1 | ARRDC3, NR2F1 | 724 | yes |
| chr5:91442456-91444549 | NR2F1 | ARRDC3, NR2F1 | 854 | yes |
| chr5:91927845-91931024 | NR2F1 | ARRDC3, NR2F1 | 659 | yes |
| chr5:91970162-91972034 | NR2F1 | ARRDC3, NR2F1 | 862 | yes |
| chr5:92312840-92314645 | NR2F1 | ARRDC3, NR2F1 | 879 | yes |
| chr5:92613862-92616844 | NR2F1 | ARRDC3, NR2F1 | 853 | yes |
| chr2:63275695-63277103 | OTX1 | EHBP1, OTX1 | 736 | yes |
| chr14:57320664-57324319 | OTX2 | OTX2, EXOC5 | 696 | yes |
| chr11:31816452-31818421 | PAX6 | PAX6 | 752 | yes |
| chr1:163359231-163360494 | PBX1 | NUF2, PBX1 | 739 | yes |
| chr1:163507965-163509139 | PBX1 | NUF2, PBX1 | 670 | yes |
| chr1:164197827-164199172 | PBX1 | NUF2, PBX1 | 619 | yes |
| chr1:164620038-164621164 | PBX1 | PBX1 | 736 | yes |
| chr1:164668592-164669823 | PBX1 | PBX1 | 750 | yes |
| chr1:164672787-164674206 | PBX1 | PBX1 | 795 | yes |
| chr1:164700259-164701522 | PBX1 | PBX1 | 762 | yes |
| chr1:164604141-164605474 | PBX1 | PBX1 | 745 | yes |
| chr1:164805507-164806794 | PBX1 | PBX1 | 757 | yes |
| chr9:128516934-128518372 | PBX3 | PBX3 | 838 | yes |
| chr9:128525348-128527214 | PBX3 | PBX3 | 855 | yes |
| chr9:128606519-128608350 | PBX3 | PBX3 | 839 | yes |
| chr9:128640165-128641327 | PBX3 | PBX3 | 863 | yes |
| chr9:128666411-128667552 | PBX3 | PBX3 | 844 | yes |
| chr9:128735158-128736174 | PBX3 | PBX3, FAM125B | 823 | yes |
| chr9:128919674-128920432 | PBX3 | PBX3, FAM125B | 773 | yes |
| chr9:128645462-128647097 | PBX3 | PBX3 | 887 | yes |
| chr1:38627529-38629265 | POU3F1 | POU3F1, LOC33944 [symbol] | 772 | yes |
| chr1:38656780-38657626 | POU3F1 | POU3F1, LOC33944 [symbol] | 738 | yes |
| chr1:38735942-38737376 | POU3F1 | L0C339442, RRAG [symbol] | 795 | yes |
| chr1:38791998-38793333 | POU3F1 | LOC339442, RRAG [symbol] | 792 | yes |
| chr1:38819171-38820577 | POU3F1 | LOC339442, RRAG [symbol] | 761 | yes |
| chr1:39192609-39194134 | POU3F1 | LOC339442, RRAG [symbol] | 793 | yes |
| chr1:38712075-38713517 | POU3F1 | LOC339442, RRAG [symbol] | 807 | yes |
| chr6:97948958-97949898 | POU3F2 | MMS22L, POU3F2 | 776 | yes |
| chr6:98212329-98214701 | POU3F2 | MMS22L, POU3F2 | 756 | yes |
| chr6:98261649-98263117 | POU3F2 | MMS22L, POU3F2 | 792 | yes |
| chr6:98278782-98280694 | POU3F2 | MMS22L, POU3F2 | 810 | yes |
| chr6:98382462-98383929 | POU3F2 | MMS22L, POU3F2 | 821 | yes |
| chr6:98504034-98506058 | POU3F2 | MMS22L, POU3F2 | 798 | yes |
| chr6:98572398-98573780 | POU3F2 | MMS22L, POU3F2 | 764 | yes |
| chr6:98831075-98833042 | POU3F2 | MMS22L, POU3F2 | 778 | yes |
| chr6:98902034-98904516 | POU3F2 | MMS22L, POU3F2 | 853 | yes |
| chr6:99005894-99007499 | POU3F2 | MMS22L, POU3F2 | 842 | yes |
| chr6:98074091-98075722 | POU3F2 | MMS22L, POU3F2 | 825 | yes |
| chr6:98829860-98831049 | POU3F2 | MMS22L, POU3F2 | 774 | yes |
| chr2:103768696-103772482 | POU3F3 | TMEM182, LOC100 [symbol] | 507 | no |
| chr2:103538361-103539868 | POU3F3 | TMEM182, LOC100 [symbol] | 847 | yes |
| chr2:103548426-103549712 | POU3F3 | TMEM182, LOC100 [symbol] | 808 | yes |
| chr2:104060734-104062561 | POU3F3 | TMEM182, LOC100 [symbol] | 853 | yes |
| chr2:104063598-104065812 | POU3F3 | TMEM182, LOC100 [symbol] | 758 | yes |
| chr2:104285458-104286792 | POU3F3 | TMEM182, LOC100 [symbol] | 783 | yes |
| chr2:104576225-104577270 | POU3F3 | TMEM182, LOC100 [symbol] | 822 | yes |
| chr2:104648312-104650249 | POU3F3 | TMEM182, LOC100 [symbol] | 767 | yes |
| chr2:105300344-105301657 | POU3F3 | LOC100287010, PO [symbol] | 716 | yes |
| chr2:105452973-105454169 | POU3F3 | LOC100287010, PO [symbol] | 764 | yes |
| chr2:105516737-105518490 | POU3F3 | AK095498, MRPS9 | 719 | yes |
| chr2:103909358-103911221 | POU3F3 | TMEM182, LOC1002 [symbol] | 799 | yes |
| chr2:105464986-105467538 | POU3F3 | LOC100287010, PO [symbol] | 780 | yes |
| chrX:82765974-82767821 | POU3F4 | POU3F4, CYLC1 | 727 | yes |
| chr18:75467090-75468311 | SALL3 | GALR1, SALL3 | 750 | yes |
| chr18:75496338-75498507 | SALL3 | GALR1, SALL3 | 822 | yes |
| chr18:75569573-75570862 | SALL3 | GALR1, SALL3 | 803 | yes |
| chr18:76009581-76010891 | SALL3 | GALR1, SALL3 | 737 | yes |
| chr18:76064036-76065306 | SALL3 | GALR1, SALL3 | 715 | yes |
| chr18:76070697-76071834 | SALL3 | GALR1, SALL3 | 787 | yes |
| chr18:76517730-76518836 | SALL3 | GALR1, SALL3 | 798 | yes |
| chr18:76461276-76462723 | SALL3 | GALR1, SALL3 | 813 | yes |
| chr18:76481722-76483257 | SALL3 | GALR1, SALL3 | 819 | yes |
| chr7:21019551-21021200 | SP8 | SP8, SP4 | 813 | yes |
| chr7:21239775-21240922 | SP8 | SP8, SP4 | 714 | yes |
| chr7:20838843-20840395 | SP8 | SP8, SP4 | 785 | yes |
| chr4:124383428-124386454 | SPRY1 | SPRY1, ANKRD50 | 613 | no |
| chr18:52699870-52701226 | TCF4 | CCDC68, TCF4 | 806 | yes |
| chr14:36907561-36909195 | TITF1 | DPPA3, SFTA3 | 877 | yes |
| chr14:36973775-36974585 | TITF1 | SFTA3 | 810 | yes |
| chr9:82274254-82276353 | TLE4 | TLE4 | 606 | no |
| chr9:82119097-82120855 | TLE4 | PSAT1, TLE4 | 802 | yes |
| chr9:82244801-82246758 | TLE4 | TLE4 | 826 | yes |
| chr9:82266057-82267053 | TLE4 | TLE4 | 808 | yes |
| chr9:82681268-82682692 | TLE4 | TLE4, TLE1 | 833 | yes |
| chr9:83122286-83123599 | TLE4 | TLE4, TLE1 | 810 | yes |
| chr9:83412700-83413972 | TLE4 | TLE4, TLE1 | 798 | yes |
| chr9:83711693-83712782 | TLE4 | TLE4, TLE1 | 762 | yes |
| chr9:82224085-82226757 | TLE4 | TLE4 | 800 | yes |
| chr9:84167351-84168176 | TLE4 | TLE4, TLE1 | 783 | yes |
| chr10:102244842-102246334 | WNT8B | WNT8B, SEC31B | 750 | yes |
| chr3:147125146-147126336 | ZIC1 | ZIC4, ZIC1 | 795 | yes |
| chr3:147378547-147380603 | ZIC1 | ZIC1, AGTR1 | 809 | yes |
| chr3:147393021-147394349 | ZIC1 | ZIC1, AGTR1 | 805 | yes |
| chr3:147748015-147749579 | ZIC1 | ZIC1, AGTR1 | 796 | yes |
| chr3:148006499-148007810 | ZIC1 | ZIC1, AGTR1 | 790 | yes |
| chr3:147563409-147566604 | ZIC1 | ZIC1, AGTR1 | 836 | yes |
| chr3:147651676-147653436 | ZIC1 | ZIC1, AGTR1 | 779 | yes |
| chr18:22139917-22141191 | ZNF521 | HRH4, ZNF521 | 817 | yes |
| chr18:22657391-22658788 | ZNF521 | ZNF521 | 826 | yes |
| chr18:22747310-22748975 | ZNF521 | ZNF521 | 874 | yes |
| chr18:22769112-22770579 | ZNF521 | ZNF521 | 853 | yes |
| chr18:22235986-22237388 | ZN F521 | HRH4, ZNF521 | 769 | yes |
| chr18:22744668-22746270 | ZNF521 | ZNF521 | 801 | yes |
| chr18:23432723-23434825 | ZNF521 | ZNF521, SS18 | 760 | yes |

[symbol]

indicates data missing or illegible when filed

TABLE 5

| | | | | | | Conservation |
|---|---|---|---|---|---|---|
| | | Near | | | | Support |
| | | Forebrain | | ChIP-seq support | | (vertebrate |
| | | Gene (see | Directly Neighboring | (if any) peak | peak | phastCons |
| ID | Tested Element (hg19) | Table3) | Genes | coordinates | height | score) |
| hs1156 | chr1:163359231-163360494 | PBX1 | NUF2, PBX1 | | | 739 |
| hs1185 | chr1:163507965-163509139 | PBX1 | NUF2, PBX1 | | | 670 |
| hs1230 | chr1:164197827-164199172 | PBX1 | NUF2, PBX1 | | | 619 |
| hs1202 | chr1:164604141-164605474 | PBX1 | PBX1 | | | 745 |
| hs1235 | chr1:164620038-164621164 | PBX1 | PBX1 | | | 736 |
| hs1144 | chr1:164668592-164669823 | PBX1 | PBX1 | | | 750 |
| hs970 | chr1:164672787-164674206 | PBX1 | PBX1 | | | 795 |
| hs1136 | chr1:164700259-164701522 | PBX1 | PBX1 | | | 762 |
| hs1191 | chr1:164805507-164806794 | PBX1 | PBX1 | | | 757 |
| hs1714 | chr1:232753930-232757436 | | SIPA1L2, KIAA1383 | chr1:232752534-232757345 | 8.834303 | 639 |
| hs1105 | chr1:38494689-38495688 | POU3F1 | UTP11L, POU3F1 | chr1:38492033-38495681 | 6.554722 | 783 |
| hs1124 | chr1:38627529-38629265 | POU3F1 | POU3F1, LOC339442 | | | 772 |
| hs1179 | chr1:38656780-38657626 | POU3F1 | POU3F1, LOC339442 | | | 738 |
| hs1001 | chr1:38712075-38713517 | POU3F1 | LOC339442, RRAGC | | | 807 |
| hs1008 | chr1:38735942-38737376 | POU3F1 | LOC339442, RRAGC | | | 795 |
| hs1098 | chr1:38791998-38793333 | POU3F1 | LOC339442, RRAGC | | | 792 |
| hs1045 | chr1:38819171-38820577 | POU3F1 | LOC339442, RRAGC | | | 761 |
| hs1546 | chr1:38835996-38838106 | POU3F1 | LOC339442, RRAGC | chr1:38835884-38837862 | 11.637023 | 783 |
| hs1031 | chr1:39192609-39194134 | POU3F1 | LOC339442, RRAGC | | | 793 |
| hs1139 | chr1:39248757-39250129 | POU3F1 | LOC339442, RRAGC | chr1:39247238-39250285 | 7.293627 | 770 |
| hs1134 | chr1:87803415-87805212 | LMO4 | LMO4 | chr1:87799160-87803500 | 7.293627 | 881 |
| hs174 | chr1:87821621-87823082 | LMO4 | LMO4, PKN2 | chr1:87820727-87823443 | 9.420391 | 928 |
| hs1161 | chr1:88025863-88027203 | LMO4 | LMO4, PKN2 | | | 767 |
| hs1217 | chr1:88065041-88066530 | LMO4 | LMO4, PKN2 | chr1:88063745-88067085 | 7.293627 | 826 |
| hs1002 | chr1:88108084-88109396 | LMO4 | LMO4, PKN2 | chr1:88107117-88109064 | 6.752707 | 843 |
| hs1058 | chr1:88183654-88184961 | LMO4 | LMO4, PKN2 | | | 815 |
| hs1055 | chr1:88402821-88404888 | LMO4 | LMO4, PKN2 | | | 842 |
| hs1198 | chr1:88535719-88538390 | LMO4 | LMO4, PKN2 | | | 807 |
| hs1200 | chr1:88577535-88578821 | LMO4 | LMO4, PKN2 | | | 728 |
| hs1135 | chr1:88595049-88596320 | LMO4 | LMO4, PKN2 | | | 786 |
| hs1216 | chr1:88646698-88648145 | LMO4 | LMO4, PKN2 | | | 846 |
| hs1107 | chr1:88686076-88687740 | LMO4 | LMO4, PKN2 | | | 829 |
| hs1068 | chr1:88841735-88843091 | LMO4 | LMO4, PKN2 | | | 832 |
| hs988 | chr1:88875731-88877192 | LMO4 | LMO4, PKN2 | | | 876 |
| hs1006 | chr10:102244842-102246334 | WNT8B | WNT8B, SEC31B | | | 750 |
| hs841 | chr10:118854124-118855243 | VAX1 | KIAA1598 | chr10:118853518-118857229 | 10.93367 | 831 |
| hs1032 | chr10:119309200-119310544 | EMX2 | EMX2, RAB11FIP2 | chr10:119308625-119311760 | 7.384363 | 808 |
| hs1221 | chr10:119313709-119314860 | EMX2 | EMX2, RAB11FIP2 | | | 786 |
| hs1087 | chr10:119491936-119493137 | EMX2 | EMX2, RAB11FIP2 | | | 793 |
| hs1236 | chr10:119589659-119591176 | EMX2 | EMX2, RAB11FIP2 | | | 796 |
| hs1551 | chr10:119725799-119727161 | EMX2 | EMX2, RAB11FIP2 | chr10:119726124-119727860 | 8.293427 | 758 |
| hs672 | chr10:120074039-120075696 | | FAM204A | | | 884 |
| hs1005 | chr10:124902927-124904638 | Hmx3 | HMX3, HMX2 | | | 831 |
| hs1588 | chr10:35925382-35927242 | FZD8 | FZD8 | | | 748 |
| hs1567 | chr10:35972892-35975932 | FZD8 | FZD8, ANKRD30A | chr10:35973550-35974697 | 7.130961 | 609 |
| hs1589 | chr10:36072272-36074291 | FZD8 | FZD8, ANKRD30A | | | 428 |
| hs1082 | chr11:31816452-31818421 | PAX6 | PAX6 | | | 752 |
| hs1531 | chr11:31895594-31899062 | PAX6 | RCN1 | chr11:31895974-31898364 | 13.931647 | 732 |
| hs1122 | chr12:103345263-103346680 | ASCL1 | PAH, ASCL1 | | | 797 |
| hs1114 | chr12:103371347-103372610 | ASCL1 | ASCL1, C12orf42 | | | 801 |
| hs1540 | chr12:103405110-103408796 | ASCL1 | ASCL1, C12orf42 | chr12:103406141-103408491 | 13.128528 | 748 |
| hs998 | chr12:103406124-103408154 | ASCL1 | ASCL1, C12orf42 | chr12:103406141-103408491 | 13.128528 | 748 |
| hs967 | chr12:103484342-103485519 | ASCL1 | ASCL1, C12orf42 | | | 812 |
| hs1575 | chr12:103570982-103573398 | ASCL1 | ASCL1, C12orf42 | | | 639 |
| hs1571 | chr12:114101195-114103805 | LHX5 | LHX5, RBM19 | chr12:114096563-114102674 | 7.130961 | 620 |
| hs798 | chr12:16170590-16171824 | | DERA | | | 857 |
| hs1532 | chr12:17171711-17174776 | LMO3 | SKP1P2, RERGL | chr12:17172763-17174723 | 7.411117 | 689 |
| hs993 | chr12:17311784-17313759 | LMO3 | SKP1P2, RERGL | | | 808 |
| hs980 | chr12:17848111-17849347 | LMO3 | SKP1P2, RERGL | | | 823 |
| hs1574 | chr12:516066-518656 | | CCDC77 | | | 415 |
| hs1568 | chr13:28318579-28320134 | GSH1 | POLR1D, GSX1 | | | 783 |
| hs1127 | chr14:27553786-27555661 | FOXG1 | NOVA1, FOXG1 | | | 728 |
| hs1075 | chr14:28398563-28400621 | FOXG1 | NOVA1, FOXG1 | | | 733 |
| hs1064 | chr14:29226075-29227673 | FOXG1 | NOVA1, FOXG1 | | | 806 |
| hs1539 | chr14:29716885-29713340 | FOXG1 | C14orf23, PRKD1 | chr14:29711403-29713148 | 8.06735 | 806 |
| hs1168 | chr14:29743374-29745881 | FOXG1 | C14orf23, PRKD1 | | | 782 |
| hs1523 | chr14:29857930-29860548 | FOXG1 | C14orf23, PRKD1 | chr14:29858041-29863155 | 47.593761 | 915 |
| hs1193 | chr14:29894197-29895582 | FOXG1 | C14orf23, PRKD1 | | | 750 |
| hs1201 | chr14:29911320-29912514 | FOXG1 | C14orf23, PRKD1 | | | 770 |
| hs1062 | chr14:29960491-29962005 | FOXG1 | C14orf23, PRKD1 | | | 773 |
| hs984 | chr14:36907561-36909195 | TITF1 | DPPA3, SFTA3 | | | 877 |
| hs1538 | chr14:36911162-36914360 | TITF1 | DPPA3, SFTA3 | chr14:36911097-36914407 | 9.53908 | 832 |
| hs1166 | chr14:36973775-36974585 | TITF1 | SFTA3 | | | 810 |
| hs1151 | chr14:53833457-53836210 | BMP4 | DDHD1, BMP4 | | | 782 |
| hs1579 | chr14:57320664-57324319 | OTX2 | OTX2, EXOC5 | | | 696 |
| hs1150 | chr14:57419008-57421445 | OTX2 | OTX2, EXOC5 | chr14:57418860-57421589 | 7.130961 | 861 |
| hs1218 | chr14:57430887-57432346 | OTX2 | OTX2, EXOC5 | chr14:57430911-57432230 | 6.752707 | 865 |
| hs622 | chr14:99466200-99467144 | | C14orf177, BCL11B | | | 792 |
| hs1129 | chr15:37216993-37219601 | MEIS2 | MEIS2 | | | 869 |
| hs1178 | chr15:37347604-37349955 | MEIS2 | MEIS2 | | | 876 |
| hs1097 | chr15:37371729-37373137 | MEIS2 | MEIS2 | | | 849 |
| hs1053 | chr18:22139917-22141191 | ZNF521 | HRH4, ZNF521 | | | 817 |
| hs1169 | chr18:22235986-22237388 | ZNF521 | HRH4, ZNF521 | | | 769 |
| hs1180 | chr18:22616831-22618682 | ZNF521 | HRH4, ZNF521 | chr18:22617966-22620091 | 6.554722 | 814 |
| hs1104 | chr18:22657391-22658788 | ZNF521 | ZNF521 | | | 826 |
| hs1027 | chr18:22744668-22746270 | ZNF521 | ZNF521 | | | 801 |
| hs962 | chr18:22747316-22748975 | ZNF521 | ZNF521 | | | 874 |
| hs1088 | chr18:22769112-22770579 | ZNF521 | ZNF521 | | | 853 |
| hs1544 | chr18:23044107-23046853 | ZNF521 | ZNF521, SS18 | chr18:23043230-23046844 | 10.965025 | 662 |
| hs1138 | chr18:23283479-23284795 | ZNF521 | ZNF521, SS18 | chr18:23283556-23285743 | 8.293427 | 719 |
| hs1566 | chr18:23432723-23434825 | ZNF521 | ZNF521, SS18 | | | 760 |
| hs1013 | chr18:52699870-52701226 | TCF4 | CCDC68, TCF4 | | | 806 |
| hs1561 | chr18:52971887-52975873 | TCF4 | TCF4 | chr18:52972905-52974769 | 12.317114 | 778 |
| hs1537 | chr18:53018678-53020044 | TCF4 | TCF4 | chr18:53018171-53021014 | 12.317114 | 824 |
| hs1195 | chr18:75467090-75468311 | SALL3 | GALR1, SALL3 | | | 750 |
| hs1020 | chr18:75496338-75498507 | SALL3 | GALR1, SALL3 | | | 822 |
| hs1186 | chr18:75569573-75570862 | SALL3 | GALR1, SALL3 | | | 803 |
| hs1047 | chr18:76009581-76010891 | SALL3 | GALR1, SALL3 | | | 737 |
| hs1083 | chr18:76064036-76065306 | SALL3 | GALR1, SALL3 | | | 715 |
| hs1141 | chr18:76070697-76071834 | SALL3 | GALR1, SALL3 | | | 787 |
| hs1011 | chr18:76461276-76462723 | SALL3 | GALR1, SALL3 | | | 813 |
| hs1056 | chr18:76481722-76483257 | SALL3 | GALR1, SALL3 | | | 819 |
| hs1194 | chr18:76517730-76518836 | SALL3 | GALR1, SALL3 | | | 798 |
| hs1212 | chr2:103538361-103539868 | POU3F3 | TMEM182, LOC100287010 | | | 847 |
| hs1125 | chr2:103548426-103549712 | POU3F3 | TMEM182, LOC100287010 | | | 808 |
| hs1581 | chr2:103768696-103772482 | POU3F3 | TMEM182, LOC100287010 | | | 507 |
| hs1093 | chr2:103792328-103793819 | POU3F3 | TMEM182, LOC100287010 | chr2:103790252-103794793 | 14.964228 | 807 |
| hs1112 | chr2:103909358-103911221 | POU3F3 | TMEM182, LOC100287010 | | | 799 |
| hs1555 | chr2:104016646-104019824 | POU3F3 | TMEM182, LOC100287010 | chr2:104017136-104019420 | 9.420391 | 758 |
| hs958 | chr2:104060734-104062561 | POU3F3 | TMEM182, LOC100287010 | | | 853 |
| hs977 | chr2:104063598-104065812 | POU3F3 | TMEM182, LOC100287016 | | | 758 |
| hs1147 | chr2:104285458-104286792 | POU3F3 | TMEM182, LOC100287010 | | | 783 |
| hs1526 | chr2:104353933-104357342 | POU3F3 | TMEM182, LOC100287010 | chr2:104354285-104357036 | 12.949564 | 635 |
| hs1126 | chr2:104576225-104577270 | POU3F3 | TMEM182, LOC100287010 | | | 822 |
| hs1529 | chr2:104578156-104580488 | POU3F3 | TMEM182, LOC100287010 | chr2:104578358-104581559 | 15.521493 | 656 |
| hs1140 | chr2:104648312-104650249 | POU3F3 | TMEM182, LOC100287010 | | | 767 |
| hs1554 | chr2:104686690-104688638 | POU3F3 | TMEM182, LOC100287010 | chr2:104687024-104688568 | 10.965025 | 670 |
| hs1131 | chr2:105032493-105034445 | POU3F3 | LOC100287010, POU3F3 | chr2:105031509-105034451 | 10.93367 | 806 |
| hs1534 | chr2:105044282-105047512 | POU3F3 | LOC100287010, POU3F3 | chr2:105045378-105048753 | 13.931647 | 747 |
| hs960 | chr2:105047627-105048798 | POU3F3 | LOC100287010, POU3F3 | chr2:105045378-105048753 | 13.931647 | 861 |
| hs1177 | chr2:105300344-105301657 | POU3F3 | LOC100287010, POU3F3 | | | 716 |
| hs969 | chr2:105317580-105319856 | POU3F3 | LOC100287010, POU3F3 | chr2:105317216-105320189 | 8.06735 | 831 |
| hs1121 | chr2:105452973-105454169 | POU3F3 | LOC100287010, POU3F3 | | | 764 |
| hs1553 | chr2:105464986-105467538 | POU3F3 | LOC100287010, POU3F3 | | | 780 |
| hs990 | chr2:105516737-105518490 | POU3F3 | AK095498, MRPS9 | | | 719 |
| hs953 | chr2:175203263-175204895 | FLJ46347 | SP9, CIR1 | | | 889 |
| hs1541 | chr2:211664571-211666475 | ERBB4 | CPS1, ERBB4 | chr2:211664330-211665926 | 8.600623 | 551 |
| hs1578 | chr2:212254840-212257158 | ERBB4 | ERBB4 | chr2:212254650-212259108 | 8.823664 | 665 |
| hs1207 | chr2:213141079-213142308 | ERBB4 | ERBB4 | | | 767 |
| hs921 | chr2:236962599-236964857 | | AGAP1 | | | 794 |
| hs1076 | chr2:58695819-58697323 | BCL11A | FANCL, BCL11A | | | 846 |
| hs1174 | chr2:58748340-58750140 | BCL11A | FANCL, BCL11A | | | 771 |
| hs1012 | chr2:58770304-58771290 | BCL11A | FANCL, BCL11A | | | 859 |
| hs1071 | chr2:58799729-58800607 | BCL11A | FANCL, BCL11A | | | 701 |
| hs1018 | chr2:58809796-58811611 | BCL11A | FANCL, BCL11A | | | 832 |
| hs1090 | chr2:58811475-58812905 | BCL11A | FANCL, BCL11A | | | 771 |
| hs1063 | chr2:58857680-58858956 | BCL11A | FANCL, BCL11A | | | 854 |
| hs1152 | chr2:58859997-58861674 | BCL11A | FANCL, BCL11A | | | 850 |
| hs1232 | chr2:58891096-58892548 | BCL11A | FANCL, BCL11A | | | 846 |
| hs1113 | chr2:58948607-58950015 | BCL11A | FANCL, BCL11A | | | 852 |
| hs1067 | chr2:58975738-58977115 | BCL11A | FANCL, BCL11A | | | 845 |
| hs1199 | chr2:59102071-59103380 | BCL11A | FANCL, BCL11A | | | 750 |
| hs1196 | chr2:59161996-59164461 | BCL11A | FANCL, BCL11A | | | 819 |
| hs1181 | chr2:59178992-59180242 | BCL11A | FANCL, BCL11A | | | 772 |
| hs1077 | chr2:59202276-59203399 | BCL11A | FANCL, BCL11A | | | 825 |
| hs1154 | chr2:59203217-59204548 | BCL11A | FANCL, BCL11A | | | 827 |
| hs1143 | chr2:59303870-59305029 | BCL11A | FANCL, BCL11A | | | 838 |
| hs975 | chr2:59304974-59306893 | BCL11A | FANCL, BCL11A | | | 873 |
| hs1119 | chr2:59476604-59477955 | BCL11A | FANCL, BCL11A | chr2:59476293-59477849 | 8.031059 | 778 |
| hs1057 | chr2:59888700-59891476 | BCL11A | FANCL, BCL11A | | | 833 |
| hs1209 | chr2:59894793-59896957 | BCL11A | FANCL, BCL11A | | | 785 |
| hs1204 | chr2:59896819-59898978 | BCL11A | FANCL, BCL11A | | | 779 |
| hs1021 | chr2:59998338-59999656 | BCL11A | FANCL, BCL11A | | | 805 |
| hs1164 | chr2:60005531-60007545 | BCL11A | FANCL, BCL11A | | | 791 |
| hs1072 | chr2:60055628-60056970 | BCL11A | FANCL, BCL11A | | | 842 |
| hs1120 | chr2:60223849-60225179 | BCL11A | FANCL, BCL11A | | | 788 |
| hs1535 | chr2:60498057-60502013 | BCL11A | FANCL, BCL11A | chr2:60500533-60503202 | 10.561487 | 768 |
| hs1111 | chr2:60516097-60518092 | BCL11A | FANCL, BCL11A | | | 839 |
| hs957 | chr2:60761404-60763073 | BCL11A | BCL11A | chr2:60760958-60762745 | 11.470763 | 904 |
| hs1176 | chr2:60794812-60796264 | BCL11A | BCL11A, PAPOLG | | | 782 |
| hs1142 | chr2:60855056-60856888 | BCL11A | BCL11A, PAPOLG | | | 844 |
| hs1066 | chr2:63275695-63277103 | OTX1 | EHBP1, OTX1 | | | 736 |
| hs1229 | chr2:66397542-66398943 | MEIS1 | SPRED2, MEIS1 | | | 830 |
| hs1110 | chr2:66510556-66511795 | MEIS1 | SPRED2, MEIS1 | | | 802 |
| hs1206 | chr2:66749539-66750931 | MEIS1 | MEIS1 | | | 864 |
| hs1210 | chr2:66762515-66765088 | MEIS1 | MEIS1 | chr2:66763070-66766365 | 13.091436 | 828 |
| hs1197 | chr2:66924703-66926115 | MEIS1 | MEIS1, ETAA1 | chr2:66921944-66924729 | 6.65441 | 841 |
| hs1584 | chr2:67414599-67416139 | MEIS1 | MEIS1, ETAA1 | | | 636 |
| hs1565 | chr2:67427102-67431497 | MEIS1 | MEIS1, ETAA1 | chr2:67427862-67429442 | 6.65441 | 714 |
| hs1025 | chr2:73124730-73126091 | EMX1 | SPR, EMX1 | chr2:73123532-73126312 | 9.504924 | 748 |
| hs1527 | chr2:8781394-8783591 | ID2 | RNF144A, ID2 | chr2:8781358-8783846 | 16.964485 | 644 |
| hs914 | chr20:21214790-21217232 | | PLK1S1 | chr20:21213336-21217052 | 10.93367 | 883 |
| hs1205 | chr20:21488551-21490021 | NKX2-2 | NKX2-4, NKX2-2 | | | 762 |
| hs632 | chr20:2719208-2719789 | | EBF4 | | | 750 |
| hs1042 | chr20:37876814-37877600 | MAFB | DHX35, MAFB | | | 771 |
| hs1237 | chr20:38580899-38582010 | MAFB | DHX35, MAFB | | | 681 |
| hs992 | chr20:38862746-38864025 | MAFB | DHX35, MAFB | | | 816 |
| hs1086 | chr20:39334182-39335059 | MAFB | MAFB, TOP1 | | | 815 |
| hs1234 | chr20:39347264-39348213 | MAFB | MAFB, TOP1 | | | 784 |
| hs1101 | chr20:39472648-39473702 | MAFB | MAFB, TOP1 | | | 747 |
| hs996 | chr20:39483347-39484593 | MAFB | MAFB, TOP1 | | | 767 |
| hs1548 | chr21:34221456-34223948 | OLIG2 | C21orf62, OLIG2 | chr21:34221397-34223878 | 10.40776 | 741 |
| hs1188 | chr21:34290782-34292115 | OLIG2 | C21orf62, OLIG2 | chr21:34289905-34293116 | 17.766947 | 802 |
| hs1559 | chr22:46240915-46242300 | WNT7B | ATXN10 | chr22:46237398-46242746 | 16.40776 | 486 |
| hs1043 | chr3:147125146-147126336 | ZIC1 | ZIC4, ZIC1 | | | 795 |
| hs1173 | chr3:147378547-147380603 | ZIC1 | ZIC1, AGTR1 | | | 809 |
| hs1184 | chr3:147393021-147394349 | ZIC1 | ZIC1, AGTR1 | | | 805 |
| hs1573 | chr3:147563409-147566604 | ZIC1 | ZIC1, AGTR1 | | | 836 |
| hs1224 | chr3:147651676-147653436 | ZIC1 | ZIC1, AGTR1 | | | 779 |
| hs1038 | chr3:147748015-147749579 | ZIC1 | ZIC1, AGTR1 | | | 796 |
| hs1549 | chr3:147753310-147755618 | ZIC1 | ZIC1, AGTR1 | chr3:147753648-147754884 | 6.919402 | 784 |
| hs1203 | chr3:147802357-147803586 | ZIC1 | ZIC1, AGTR1 | chr3:147800794-147803205 | 17.766947 | 844 |
| hs1115 | chr3:148006499-148007810 | ZIC1 | ZIC1, AGTR1 | | | 790 |
| hs636 | chr3:157882303-157883963 | | RSRC1 | | | 920 |
| hs1712 | chr3:173448118-173452132 | | NLGN1 | | | 717 |
| hs192 | chr3:180773639-180775802 | | DNAJC19, SOX2 | chr3:180772860-180775028 | 7.293627 | 895 |
| hs1563 | chr3:193489359-193491333 | HES1 | OPA1, HES1 | chr3:193488976-193491260 | 6.65441 | 699 |
| hs1543 | chr3:193929360-193931457 | HES1 | HES1, CPN2 | chr3:193929132-193933564 | 10.965025 | 706 |
| hs1557 | chr3:28033828-28035751 | EOMES | AK297461, CMC1 | | | 824 |
| hs1214 | chr3:70701489-70702904 | FOXP1 | MITF, FOXP1 | | | 741 |
| hs1231 | chr3:71026229-71026764 | FOXP1 | FOXP1 | | | 810 |
| hs965 | chr3:71099157-71100851 | FOXP1 | FOXP1 | | | 931 |
| hs1092 | chr3:71153556-71155053 | FOXP1 | FOXP1 | | | 826 |
| hs1572 | chr3:71186391-71188583 | FOXP1 | FOXP1 | chr3:71185974-71188527 | 7.293627 | 759 |
| hs1160 | chr3:71253670-71255013 | FOXP1 | FOXP1 | | | 825 |
| hs187 | chr3:71290418-71292584 | FOXP1 | FOXP1 | chr3:71288860-71294549 | 9.53908 | 827 |
| hs1116 | chr3:71446827-71448809 | FOXP1 | FOXP1 | | | 784 |
| hs997 | chr3:71499477-71500970 | FOXP1 | FOXP1 | | | 843 |
| hs973 | chr3:71507469-71508874 | FOXP1 | FOXP1 | | | 844 |
| hs1149 | chr3:71573607-71574540 | FOXP1 | FOXP1 | | | 833 |
| hs1010 | chr3:71590897-71592786 | FOXP1 | FOXP1 | | | 818 |
| hs1545 | chr4:109254340-109257033 | LEF1 | LEF1, LOC285456 | chr4:109254524-109257107 | 11.768542 | 672 |
| hs1050 | chr4:109531908-109533465 | LEF1 | LOC285456 | | | 753 |
| hs981 | chr4:113442390-113443530 | NEUROG2 | NEUROG2, C4orf21 | | | 819 |
| hs1582 | chr4:124383428-124386454 | SPRY1 | SPRY1, ANKRD50 | | | 613 |
| hs1525 | chr4:124775814-124779530 | SPRY1 | SPRY1, ANKRD50 | chr4:124777645-124779158 | 17.215148 | 721 |
| hs840 | chr4:66989480-66990366 | | EPHA5, CENPC1 | chr4:66988731-66990409 | 8.293427 | 734 |
| hs1130 | chr5:157589029-157590477 | EBF1 | CLINT1, EBF1 | | | 832 |
| hs1208 | chr5:158017768-158019067 | EBF1 | CLINT1, EBF1 | | | 808 |
| hs1137 | chr5:158227696-158229500 | EBF1 | EBF1 | | | 814 |
| hs1022 | chr5:158486120-158487498 | EBF1 | EBF1 | | | 830 |
| hs1117 | chr5:158508842-158510137 | EBF1 | EBF1 | | | 809 |
| hs1123 | chr5:158517785-158518914 | EBF1 | EBF1 | | | 788 |
| hs1187 | chr5:50390899-50392257 | ISL1 | PARP8, ISL1 | chr5:50390582-50392463 | 8.06735 | 759 |
| hs853 | chr5:87083012-87084752 | | CCNH, TMEM161B | chr5:87082335-87085197 | 7.293627 | 825 |
| hs989 | chr5:90768370-90769843 | NR2F1 | ARRDC3, NR2F1 | | | 775 |
| hs982 | chr5:90785763-90787167 | NR2F1 | ARRDC3, NR2F1 | | | 812 |
| hs1227 | chr5:91271776-91272886 | NR2F1 | ARRDC3, NR2F1 | | | 765 |
| hs952 | chr5:91442456-91444549 | NR2F1 | ARRDC3, NR2F1 | | | 854 |
| hs1034 | chr5:91700124-91701467 | NR2F1 | ARRDC3, NR2F1 | | | 736 |
| hs1084 | chr5:91765018-91766129 | NR2F1 | ARRDC3, NR2F1 | | | 734 |
| hs1162 | chr5:91828131-91829295 | NR2F1 | ARRDC3, NR2F1 | | | 738 |
| hs1577 | chr5:91927845-91931024 | NR2F1 | ARRDC3, NR2F1 | | | 659 |
| hs1109 | chr5:91940922-91942042 | NR2F1 | ARRDC3, NR2F1 | | | 760 |
| hs971 | chr5:91970162-91972034 | NR2F1 | ARRDC3, NR2F1 | | | 862 |
| hs1039 | chr5:92031088-92033197 | NR2F1 | ARRDC3, NR2F1 | | | 803 |
| hs1155 | chr5:92035493-92036961 | NR2F1 | ARRDC3, NR2F1 | | | 813 |
| hs1079 | chr5:92141511-92143537 | NR2F1 | ARRDC3, NR2F1 | | | 841 |
| hs1153 | chr5:92219848-92221133 | NR2F1 | ARRDC3, NR2F1 | | | 764 |
| hs1024 | chr5:92312840-92314645 | NR2F1 | ARRDC3, NR2F1 | | | 879 |
| hs1049 | chr5:92314781-92316083 | NR2F1 | ARRDC3, NR2F1 | | | 837 |
| hs1146 | chr5:92426546-92428433 | NR2F1 | ARRDC3, NR2F1 | | | 803 |
| hs1560 | chr5:92476842-92479105 | NR2F1 | ARRDC3, NR2F1 | | | 657 |
| hs1170 | chr5:92526066-92527353 | NR2F1 | ARRDC3, NR2F1 | | | 806 |
| hs1222 | chr5:92536353-92537380 | NR2F1 | ARRDC3, NR2F1 | | | 724 |
| hs1060 | chr5:92613862-92616844 | NR2F1 | ARRDC3, NR2F1 | | | 853 |
| hs1172 | chr5:92634702-92636476 | NR2F1 | ARRDC3, NR2F1 | chr5:92634168-92637477 | 7.293627 | 787 |
| hs1550 | chr5:92741502-92744743 | NR2F1 | ARRDC3, NR2F1 | chr5:92742104-92745498 | 10.40776 | 813 |
| hs1033 | chr6:108435330-108436506 | NR2E1 | OSTM1, NR2E1 | | | 787 |
| hs1189 | chr6:108437243-108438452 | NR2E1 | OSTM1, NR2E1 | chr6:108437283-108443041 | 7.384363 | 778 |
| hs1052 | chr6:18536628-18538267 | ID4 | RNF144B, ID4 | chr6:18535962-18538169 | 8.834303 | 778 |
| hs1580 | chr6:18612650-18614840 | ID4 | RNF144B, ID4 | | | 688 |
| hs1094 | chr6:18662790-18664038 | ID4 | RNF144B, ID4 | chr6:18662926-18666129 | 12.949564 | 807 |
| hs1542 | chr6:19533421-19535679 | ID4 | RNF144B, ID4 | chr6:19532901-19535191 | 7.293627 | 541 |
| hs1533 | chr6:19719222-19722910 | ID4 | RNF144B, ID4 | chr6:19718442-19723115 | 11.470763 | 783 |
| hs1175 | chr6:19976157-19977513 | ID4 | ID4, MBOAT1 | chr6:19976077-19977874 | 13.550532 | 817 |
| hs1225 | chr6:41380559-41381515 | FOXP4 | NCR2, DQ141194 | | | 603 |
| hs1003 | chr6:41434455-41435695 | FOXP4 | NCR2, DQ141194 | | | 815 |
| hs1145 | chr6:41436815-41438024 | FOXP4 | NCR2, DQ141194 | | | 760 |
| hs1100 | chr6:41560717-41562075 | FOXP4 | FOXP4 | | | 809 |
| hs978 | chr6:97754043-97755513 | POU3F2 | MMS22L, POU3F2 | chr6:97754083-97755780 | 10.196738 | 811 |
| hs1564 | chr6:97912825-97915982 | POU3F2 | MMS22L, POU3F2 | chr6:97912601-97915206 | 10.965025 | 792 |
| hs1059 | chr6:97948958-97949898 | POU3F2 | MMS22L, POU3F2 | | | 776 |
| hs1035 | chr6:98074091-98075722 | POU3F2 | MMS22L, POU3F2 | | | 825 |
| hs1220 | chr6:98212329-98214701 | POU3F2 | MMS22L, POU3F2 | | | 756 |
| hs1054 | chr6:98261649-98263117 | POU3F2 | MMS22L, POU3F2 | | | 792 |
| hs995 | chr6:98278782-98280694 | POU3F2 | MMS22L, POU3F2 | | | 810 |
| hs985 | chr6:98382462-98383929 | POU3F2 | MMS22L, POU3F2 | | | 821 |
| hs1233 | chr6:98504034-98506058 | POU3F2 | MMS22L, POU3F2 | | | 798 |
| hs1106 | chr6:98572398-98573780 | POU3F2 | MMS22L, POU3F2 | | | 764 |
| hs1128 | chr6:98829860-98831049 | POU3F2 | MMS22L, POU3F2 | | | 774 |
| hs1159 | chr6:98831075-98833042 | POU3F2 | MMS22L, POU3F2 | | | 778 |
| hs1081 | chr6:98902034-98904516 | POU3F2 | MMS22L, POU3F2 | | | 853 |
| hs1014 | chr6:99005894-99007499 | POU3F2 | MMS22L, POU3F2 | | | 842 |
| hs1085 | chr6:99089361-99091043 | POU3F2 | MMS22L, POU3F2 | chr6:99089365-99091231 | 10.196738 | 808 |
| hs1069 | chr7:114052100-114053403 | FOXP2 | FOXP2 | | | 800 |
| hs1167 | chr7:114055419-114056748 | FOXP2 | FOXP2 | | | 820 |
| hs999 | chr7:114142132-114143527 | FOXP2 | FOXP2 | | | 885 |
| hs1080 | chr7:114261073-114263089 | FOXP2 | FOXP2 | | | 875 |
| hs954 | chr7:114287987-114290557 | FOXP2 | FOXP2 | | | 905 |
| hs1215 | chr7:114292966-114293972 | FOXP2 | FOXP2 | | | 800 |
| hs956 | chr7:114299711-114302078 | FOXP2 | FOXP2 | | | 905 |
| hs966 | chr7:114326912-114329772 | FOXP2 | FOXP2 | | | 892 |
| hs1192 | chr7:114463797-114464462 | FOXP2 | FOXP2, MDFIC | | | 820 |
| hs1019 | chr7:20838843-20840395 | SP8 | SP8, SP4 | | | 785 |
| hs1007 | chr7:20997668-20999102 | SP8 | SP8, SP4 | chr7:20997062-20999329 | 6.752707 | 852 |
| hs1148 | chr7:21019551-21021200 | SP8 | SP8, SP4 | | | 813 |
| hs1226 | chr7:21080801-21082086 | SP8 | SP8, SP4 | chr7:21080455-21082857 | 8.06735 | 833 |
| hs1223 | chr7:21239775-21240922 | SP8 | SP8, SP4 | | | 714 |
| hs807 | chr7:22091362-22092557 | | CDCA7L, RAPGEF5 | | | 772 |
| hs1586 | chr7:42185602-42187508 | GLI3 | GLI3 | chr7:42185469-42187515 | 7.130961 | 689 |
| hs1213 | chr7:42252831-42254560 | GLI3 | GLI3 | | | 818 |
| hs1132 | chr7:42432266-42433365 | GLI3 | GLI3, C7orf25 | | | 678 |
| hs961 | chr7:50333048-50334464 | IKFZ1 | C7orf72, IKZF1 | | | 726 |
| hs972 | chr7:50357638-56358644 | IKFZ1 | IKZF1 | | | 823 |
| hs782 | chr8:21901089-21902326 | FGF17 | FGF17 | | | 612 |
| hs781 | chr8:21907426-21908282 | FGF17 | FGF17, EPB49 | | | 590 |
| hs1719 | chr8:32063683-32067187 | | WRN, NRG1 | | | 524 |
| hs1718 | chr8:33660674-33665591 | | DUSP26, UNC5D | chr8:33661561-33664104 | 24.108217 | 726 |
| hs1715 | chr8:33891203-33892738 | | DUSP26, UNC5D | | | 541 |
| hs631 | chr8:36957851-36958723 | | KCNU1, ZNF703 | | | 754 |
| hs1030 | chr9:128516934-128518372 | PBX3 | PBX3 | | | 838 |
| hs818 | chr9:128520992-128522653 | PBX3 | PBX3 | chr9:128519949-128522980 | 6.752707 | 881 |
| hs1102 | chr9:128522875-128525442 | PBX3 | PBX3 | chr9:128519949-128522980 | 6.752707 | 843 |
| hs983 | chr9:128525348-128527214 | PBX3 | PBX3 | | | 855 |
| hs1099 | chr9:128606519-128608350 | PBX3 | PBX3 | | | 839 |
| hs1095 | chr9:128640165-128641327 | PBX3 | PBX3 | | | 863 |
| hs1017 | chr9:128645462-128647097 | PBX3 | PBX3 | | | 887 |
| hs1000 | chr9:128666411-128667552 | PBX3 | PBX3 | | | 844 |
| hs1103 | chr9:128735158-128736174 | PBX3 | PBX3, FAM125B | | | 823 |
| hs987 | chr9:128869446-128870934 | PBX3 | PBX3, FAM125B | chr9:128869390-128871154 | 7.293627 | 876 |
| hs1015 | chr9:128919674-128920432 | PBX3 | PBX3, FAM125B | | | 773 |
| hs1108 | chr9:128945054-128946417 | PBX3 | PBX3, FAM125B | chr9:128944613-128946717 | 8.06735 | 827 |
| hs876 | chr9:133540555-133541228 | | PRDM12 | | | 763 |
| hs1530 | chr9:81010879-81014103 | | PSAT1, TLE4 | chr9:81011179-81014105 | 19.898262 | 771 |
| hs1585 | chr9:81052204-81055820 | | PSAT1, TLE4 | chr9:81051713-81055528 | 10.40776 | 800 |
| hs1041 | chr9:82010246-82011547 | TLE4 | PSAT1, TLE4 | chr9:82009683-82011502 | 12.708324 | 829 |
| hs1074 | chr9:82119097-82120855 | TLE4 | PSAT1, TLE4 | | | 802 |
| hs1078 | chr9:82224085-82226757 | TLE4 | TLE4 | | | 800 |
| hs1026 | chr9:82244801-82246758 | TLE4 | TLE4 | | | 826 |
| hs1183 | chr9:82266057-82267053 | TLE4 | TLE4 | | | 808 |
| hs1587 | chr9:82274254-82276353 | TLE4 | TLE4 | | | 606 |
| hs1163 | chr9:82590314-82593174 | TLE4 | TLE4, TLE1 | chr9:82589393-82592308 | 6.752707 | 807 |
| hs1004 | chr9:82681268-82682692 | TLE4 | TLE4, TLE1 | | | 833 |
| hs1211 | chr9:83122286-83123599 | TLE4 | TLE4, TLE1 | | | 810 |
| hs974 | chr9:83412700-83413972 | TLE4 | TLE4, TLE1 | | | 798 |
| hs1228 | chr9:83711693-83712782 | TLE4 | TLE4, TLE1 | | | 762 |
| hs1118 | chr9:84167351-84168176 | TLE4 | TLE4, TLE1 | | | 783 |
| hs1029 | chrX:82765974-82767821 | POU3F4 | POU3F4, CYLC1 | | | 727 |

| | | extremely | Reproducible Enhancer | | |
|---|---|---|---|---|---|
| | | conserved | Activity | | |
| | | (Visel et al | | other | |
| ID | Tested Element (hg19) | 2008) | forebrain | structures | Full annotation of activities |
| hs1156 | chr1:163359231-163360494 | yes | no | no | |
| hs1185 | chr1:163507965-163509139 | yes | no | yes | limb[4/6] |
| hs1230 | chr1:164197827-164199172 | yes | no | no | |
| hs1202 | chr1:164604141-164605474 | yes | yes | yes | hindbrain (rhombencephalon)[6/6] \| |
| | | | | | forebrain[4/6] |
| hs1235 | chr1:164620038-164621164 | yes | no | yes | hindbrain (rhombencephalon)[6/8] |
| hs1144 | chr1:164668592-164669823 | yes | no | yes | heart[5/12] |
| hs970 | chr1:164672787-164674206 | yes | no | no | |
| hs1136 | chr1:164700259-164701522 | yes | no | no | |
| hs1191 | chr1:164805507-164806794 | yes | yes | yes | forebrain[4/7] \| facial mesenchyme[3/7] |
| hs1714 | chr1:232753930-232757436 | yes | no | no | |
| hs1105 | chr1:38494689-38495688 | yes | no | no | |
| hs1124 | chr1:38627529-38629265 | yes | no | no | |
| hs1179 | chr1:38656780-38657626 | yes | no | no | |
| hs1001 | chr1:38712075-38713517 | yes | yes | yes | neural tube[9/11] \| hindbrain |
| | | | | | (rhombencephalon)[9/11] \| midbrain |
| | | | | | (mesencephalon)[10/11] \| forebrain [9/11] |
| hs1008 | chr1:38735942-38737376 | yes | no | no | |
| hs1098 | chr1:38791998-38793333 | yes | no | no | |
| hs1045 | chr1:38819171-38820577 | yes | no | no | |
| hs1546 | chr1:38835996-38838106 | yes | yes | yes | forebrain [4/5] |
| hs1031 | chr1:39192609-39194134 | yes | no | yes | nose[3/10] |
| hs1139 | chr1:39248757-39250129 | yes | no | yes | hindbrain (rhombencephalon)[5/5] |
| hs1134 | chr1:87803415-87805212 | yes | no | no | |
| hs174 | chr1:87821621-87823082 | yes | yes | yes | forebrain[9/12] \| limb[3/12] |
| hs1161 | chr1:88025863-88027203 | yes | yes | yes | forebrain[6/7] |
| hs1217 | chr1:88065041-88066530 | yes | no | yes | neural tube[5/8] |
| hs1002 | chr1:88108084-88109396 | yes | no | yes | heart[3/5] |
| hs1058 | chr1:88183654-88184961 | yes | no | no | |
| hs1055 | chr1:88402821-88404888 | yes | no | no | |
| hs1198 | chr1:88535719-88538390 | yes | no | yes | other[4/6] |
| hs1200 | chr1:88577535-88578821 | yes | no | no | |
| hs1135 | chr1:88595049-88596320 | yes | no | no | |
| hs1216 | chr1:88646698-88648145 | yes | no | no | |
| hs1107 | chr1:88686076-88687740 | yes | no | yes | dorsal root ganglion[5/6] |
| hs1068 | chr1:88841735-88843091 | yes | no | no | |
| hs988 | chr1:88875731-88877192 | yes | no | no | |
| hs1006 | chr10:102244842-102246334 | yes | yes | yes | hindbrain (rhombencephalon)[6/6] \| |
| | | | | | midbrain (mesencephalon)[6/6] \| |
| | | | | | forebrain[6/6] |
| hs841 | chr10:118854124-118855243 | yes | yes | yes | midbrain (mesencephalon)[3/8] \| |
| | | | | | forebrain[5/8] |
| hs1032 | chr10:119309200-119310544 | yes | yes | yes | midbrain (mesencephalon)[6/7] \| |
| | | | | | forebrain[6/7] |
| hs1221 | chr10:119313709-119314860 | yes | no | no | |
| hs1087 | chr10:119491936-119493137 | yes | no | no | |
| hs1236 | chr10:119589659-119591176 | yes | yes | yes | forebrain[3/3] \| limb[3/3] |
| hs1551 | chr10:119725799-119727161 | yes | no | yes | heart[3/7] |
| hs672 | chr10:120074039-120075696 | no | yes | yes | midbrain (mesencephalon)[4/5] \| |
| | | | | | forebrain[4/5] |
| hs1005 | chr10:124902927-124904638 | yes | no | no | |
| hs1588 | chr10:35925382-35927242 | yes | yes | yes | forebrain[5/6] |
| hs1567 | chr10:35972892-35975932 | no | no | yes | hindbrain (rhombencephalon)[6/8] \| |
| | | | | | limb[8/8] \| branchial arch[3/8] \| genital |
| | | | | | tubercle[4/8] |
| hs1589 | chr10:36072272-36074291 | no | no | yes | cranial nerve[4/8] |
| hs1082 | chr11:31816452-31818421 | yes | no | yes | neural tube[10/14] \| hindbrain |
| | | | | | (rhombencephalon)[14/14] |
| hs1531 | chr11:31895594-31899062 | yes | yes | yes | neural tube[8/8] \| midbrain |
| | | | | | (mesencephalon)[3/8] \| forebrain[4/8] |
| hs1122 | chr12:103345263-103346680 | yes | no | yes | eye[6/7] |
| hs1114 | chr12:103371347-103372610 | yes | no | yes | neural tube[4/6] \| hindbrain |
| | | | | | (rhombencephalon)[6/6] \| midbrain |
| | | | | | (mesencephalon)[6/6] |
| hs1540 | chr12:103405110-103408796 | yes | yes | yes | midbrain (mesencephalon)[5/4] \| |
| | | | | | forebrain[4/4] |
| hs998 | chr12:103406124-103408154 | yes | yes | yes | hindbrain (rhombencephalon)[7/8] \| |
| | | | | | midbrain (mesencephalon)[8/8] \| |
| | | | | | forebrain[7/8] \| nose[4/8] |
| hs967 | chr12:103484342-103485519 | yes | yes | yes | forebrain[4/4] |
| hs1575 | chr12:103570982-103573398 | yes | no | yes | midbrain (mesencephalon)[4/7] |
| hs1571 | chr12:114101195-114103805 | yes | yes | yes | midbrain (mesencephalon)[5/5] \| |
| | | | | | forebrain[4/5] |
| hs798 | chr12:16170590-16171824 | yes | yes | yes | neural tube[8/9] \| forebrain[9/9] |
| hs1532 | chr12:17171711-17174776 | yes | yes | yes | forebrain[11/11] \| eye[8/11] |
| hs993 | chr12:17311784-17313759 | yes | no | yes | hindbrain (rhombencephalon)[3/7] |
| hs980 | chr12:17848111-17849347 | yes | no | yes | hindbrain (rhombencephalon)[4/5] \| |
| | | | | | midbrain (mesencephalon)[4/5] |
| hs1574 | chr12:516066-518656 | no | yes | yes | neural tube[6/6] \| hindbrain |
| | | | | | (rhombencephalon)[4/6] \| midbrain |
| | | | | | (mesencephalon)[5/6] \| forebrain[5/6] |
| hs1568 | chr13:28318579-28320134 | no | yes | yes | hindbrain (rhombencephalon)[4/5] \| |
| | | | | | forebrain[3/5] |
| hs1127 | chr14:27553786-27555661 | yes | no | no | |
| hs1075 | chr14:28398563-28400621 | yes | no | no | |
| hs1064 | chr14:29226075-29227673 | yes | yes | yes | hindbrain (rhombencephalon)[3/5] \| |
| | | | | | forebrain[3/5] |
| hs1539 | chr14:29716885-29713340 | yes | no | yes | hindbrain (rhombencephalon)[4/5] |
| hs1168 | chr14:29743374-29745881 | yes | no | yes | hindbrain (rhombencephalon)[3/8] \| |
| | | | | | cranial nerve[8/8] \| facial |
| | | | | | mesenchyme[7/8] |
| hs1523 | chr14:29857930-29860548 | no | yes | yes | midbrain (mesencephalon)[11/13] \| |
| | | | | | forebrain[12/13] |
| hs1193 | chr14:29894197-29895582 | yes | no | no | |
| hs1201 | chr14:29911320-29912514 | yes | no | no | |
| hs1062 | chr14:29960491-29962005 | yes | no | no | |
| hs984 | chr14:36907561-36909195 | yes | no | no | |
| hs1538 | chr14:36911162-36914360 | yes | yes | yes | forebrain[4/4] |
| hs1166 | chr14:36973775-36974585 | yes | yes | yes | forebrain[6/6] |
| hs1151 | chr14:53833457-53836210 | yes | no | yes | limb[8/8] \| heart[3/8] |
| hs1579 | chr14:57320664-57324319 | yes | yes | yes | forebrain[4/6] |
| hs1150 | chr14:57419008-57421445 | yes | no | yes | eye[8/9] |
| hs1218 | chr14:57430887-57432346 | yes | no | yes | midbrain (mesencephalon)[7/7] |
| hs622 | chr14:99466200-99467144 | yes | yes | yes | forebrain[5/9] |
| hs1129 | chr15:37216993-37219601 | yes | no | no | |
| hs1178 | chr15:37347604-37349955 | yes | no | no | |
| hs1097 | chr15:37371729-37373137 | yes | no | no | |
| hs1053 | chr18:22139917-22141191 | yes | no | no | |
| hs1169 | chr18:22235986-22237388 | yes | yes | yes | midbrain (mesencephalon)[7/8] \| |
| | | | | | forebrain[5/8] \| trigeminal V (ganglion,cranial)[4/8] |
| hs1180 | chr18:22616831-22618682 | yes | no | yes | midbrain (mesencephalon)[5/6] |
| hs1104 | chr18:22657391-22658788 | yes | no | no | |
| hs1027 | chr18:22744668-22746270 | yes | yes | yes | hindbrain (rhombencephalon)[4/9] \| |
| | | | | | forebrain[5/9] |
| hs962 | chr18:21747316-22748975 | yes | no | no | |
| hs1088 | chr18:22769112-22770579 | yes | no | no | |
| hs1544 | chr18:23044107-23046853 | yes | yes | yes | hindbrain (rhombencephalon)[5/5] \| |
| | | | | | midbrain (mesencephalon)[5/5] \| |
| | | | | | forebrain[4/5] |
| hs1138 | chr18:23283479-23284795 | yes | no | no | |
| hs1566 | chr18:23432723-23434825 | yes | yes | yes | forebrain[4/5] |
| hs1013 | chr18:52699870-52701226 | yes | yes | yes | forebrain[4/6] |
| hs1561 | chr18:52971887-52975873 | yes | no | no | |
| hs1537 | chr18:53018678-53020044 | no | yes | yes | forebrain[5/6] |
| hs1195 | chr18:75467090-75468311 | yes | no | no | |
| hs1020 | chr18:75496338-75498507 | yes | no | yes | neural tube[4/9] \| hindbrain |
| | | | | | (rhombencephalon)[8/9] |
| hs1186 | chr18:75569573-75570862 | yes | no | yes | neural tube[5/7] \| hindbrain |
| | | | | | (rhombencephalon)[5/7] |
| hs1047 | chr18:76009581-76010891 | yes | no | no | |
| hs1083 | chr18:76064036-76065306 | yes | no | no | |
| hs1141 | chr18:76070697-76071834 | yes | no | no | |
| hs1011 | chr18:76461276-76462723 | yes | yes | yes | forebrain[5/7] |
| hs1056 | chr18:76481722-76483257 | yes | yes | yes | neural tube[5/8] \| midbrain |
| | | | | | (mesencephalon)[5/8] \| forebrain[7/8] |
| hs1194 | chr18:76517730-76518836 | yes | no | no | |
| hs1212 | chr2:103538361-103539868 | yes | no | yes | heart[4/6] |
| hs1125 | chr2:103548426-103549712 | yes | no | no | |
| hs1581 | chr2:103768696-103772482 | no | no | yes | eye [7/8] |
| hs1093 | chr2:103792328-103793819 | yes | no | yes | midbrain (mesencephalon)[9/9] |
| hs1112 | chr2:103909358-103911221 | yes | yes | yes | hindbrain (rhombencephalon)[10/12] \| |
| | | | | | midbrain (mesencephalon)[12/12] \| |
| | | | | | forebrain[12/12] \| limb[12/12] \| branchial |
| | | | | | arch[12/12] \| other[11/12] |
| hs1555 | chr2:104016646-104019824 | yes | no | yes | neural tube[4/5] \| hindbrain |
| | | | | | (rhombencephalon)[4/5] \| midbrain |
| | | | | | (mesencephalon)[4/5] \| liver[3/5] |
| hs958 | chr2:104060734-104062561 | yes | no | no | |
| hs977 | chr2:104063598-104065812 | yes | no | no | |
| hs1147 | chr2:104285458-104286792 | yes | no | yes | dorsal root ganglion[6/7] \| trigeminal V |
| | | | | | (ganglion, cranial)[4/7] \| cranial nerve[6/7] |
| hs1526 | chr2:104353933-104357342 | yes | yes | yes | forebrain[8/8] |
| hs1126 | chr2:104576225-104577270 | yes | no | no | |
| hs1529 | chr2:104578156-104580488 | yes | yes | yes | forebrain[4/4] |
| hs1140 | chr2:104648312-104650249 | yes | no | no | |
| hs1554 | chr2:104686690-104688638 | yes | no | yes | branchial arch[5/13] |
| hs1131 | chr2:105032493-105034445 | yes | yes | yes | midbrain (mesencephalon)[3/8] \| |
| | | | | | forebrain[5/8] |
| hs1534 | chr2:105044282-105047512 | yes | yes | yes | hindbrain (rhombencephalon)[7/7] \| |
| | | | | | midbrain (mesencephalon)[7/7] \| |
| | | | | | forebrain[7/7] |
| hs960 | chr2:105047627-105048798 | yes | no | no | |
| hs1177 | chr2:105300344-105301657 | yes | no | yes | heart[3/10] |
| hs969 | chr2:105317580-105319856 | yes | yes | yes | forebrain[9/9] |
| hs1121 | chr2:105452973-105454169 | yes | no | no | |
| hs1553 | chr2:105464986-105467538 | yes | yes | yes | neural tube[5/6] \| midbrain |
| | | | | | (mesencephalon)[5/6] \| forebrain[5/6] |
| hs990 | chr2:105516737-105518490 | yes | no | yes | hindbrain (rhombencephalon)[6/11] \| |
| | | | | | other[4/11] |
| hs953 | chr2:175203263-175204895 | yes | yes | yes | neural tube[13/13] \| hindbrain |
| | | | | | (rhombencephalon)[11/13] \| |
| | | | | | forebrain[10/13] |
| hs1541 | chr2:211664571-211666475 | no | no | no | |
| hs1578 | chr2:212254840-212257158 | yes | yes | yes | hindbrain (rhombencephalon)[4/5] \| |
| | | | | | midbrain (mesencephalon)[4/5] \| |
| | | | | | forebrain[4/5] |
| hs1207 | chr2:213141079-213142308 | yes | no | no | |
| hs921 | chr2:236962599-236964857 | yes | yes | yes | forebrain[6/7] \| limb[4/7] \| branchial |
| | | | | | arch[5/7] |
| hs1076 | chr2:58695819-58697323 | yes | no | no | |
| hs1174 | chr2:58748340-58750140 | yes | no | yes | dorsal root ganglion[6/6] |
| hs1012 | chr2:58770304-58771290 | yes | no | no | |
| hs1071 | chr2:58799729-58800607 | yes | no | yes | ear[4/10] |
| hs1018 | chr2:58809796-58811611 | yes | no | no | |
| hs1090 | chr2:58811475-58812905 | yes | no | no | |
| hs1063 | chr2:58857680-58858956 | yes | no | no | |
| hs1152 | chr2:58859997-58861674 | yes | no | yes | limb[4/5] |
| hs1232 | chr2:58891096-58892548 | yes | no | no | |
| hs1113 | chr2:58948607-58950015 | yes | no | no | |
| hs1067 | chr2:58975738-58977115 | yes | no | yes | dorsal root ganglion[3/7] \| limb[5/7] |
| hs1199 | chr2:59102071-59103380 | yes | no | yes | other[3/6] |
| hs1196 | chr2:59161996-59164461 | yes | no | no | |
| hs1181 | chr2:59178992-59180242 | yes | no | yes | heart[3/8] |
| hs1077 | chr2:59202276-59203399 | yes | no | no | |
| hs1154 | chr2:59203217-59204548 | yes | no | no | |
| hs1143 | chr2:59303870-59305029 | yes | no | no | |
| hs975 | chr2:59304974-59306893 | yes | no | yes | midbrain (mesencephalon)[4/7] |
| hs1119 | chr2:59476604-59477955 | yes | no | yes | neural tube[6/6] \| hindbrain |
| | | | | | (rhombencephalon)[5/6] |
| hs1057 | chr2:59888700-59891476 | yes | no | no | |
| hs1209 | chr2:59894793-59896957 | yes | no | no | |
| hs1204 | chr2:59896819-59898978 | yes | no | no | |
| hs1021 | chr2:59998338-59999656 | yes | no | no | |
| hs1164 | chr2:60005531-60007545 | yes | no | no | |
| hs1072 | chr2:60055628-60056970 | yes | no | no | |
| hs1120 | chr2:60223849-60225179 | yes | no | no | |
| hs1535 | chr2:60498057-60502013 | yes | no | yes | hindbrain (rhombencephalon)[4/5] |
| hs1111 | chr2:60516097-60518092 | yes | no | no | |
| hs957 | chr2:60761404-60763073 | yes | yes | yes | forebrain[4/4] |
| hs1176 | chr2:60794812-60796264 | yes | no | no | |
| hs1142 | chr2:60855056-60856888 | yes | no | yes | hindbrain (rhombencephalon)[3/3] |
| hs1066 | chr2:63275695-63277103 | yes | yes | yes | hindbrain (rhombencephalon)[5/5] \| |
| | | | | | midbrain (mesencephalon)[5/5] \| |
| | | | | | forebrain[5/5] |
| hs1229 | chr2:66397542-66398943 | yes | no | no | |
| hs1110 | chr2:66510556-66511795 | yes | no | no | |
| hs1206 | chr2:66749539-66750931 | yes | no | no | |
| hs1210 | chr2:66762515-66765088 | yes | yes | yes | forebrain[4/5] |
| hs1197 | chr2:66924703-66926115 | yes | no | no | |
| hs1584 | chr2:67414599-67416139 | no | no | no | |
| hs1565 | chr2:67427102-67431497 | yes | no | no | |
| hs1025 | chr2:73124730-73126091 | yes | yes | yes | forebrain[7/8] |
| hs1527 | chr2:8781394-8783591 | yes | yes | yes | neural tube[7/10] \| hindbrain |
| | | | | | (rhombencephalon)[7/10] \| midbrain |
| | | | | | (mesencephalon)[7/10] \| forebrain[7/10] |
| hs914 | chr20:21214790-21217232 | no | yes | yes | forebrain[9/10] |
| hs1205 | chr20:21488551-21490021 | yes | no | yes | hindbrain (rhombencephalon)[6/8] \| |
| | | | | | midbrain (mesencephalon)[4/8] |
| hs632 | chr20:2719208-2719789 | yes | yes | yes | neural tube[5/9] \| hindbrain |
| | | | | | (rhombencephalon)[5/9] \| midbrain |
| | | | | | (mesencephalon)[5/9] \| forebrain[5/9] |
| hs1042 | chr20:37876814-37877600 | yes | no | yes | neural tube[5/7] |
| hs1237 | chr20:38580899-38582010 | yes | no | no | |
| hs992 | chr20:38862746-38864025 | yes | no | no | |
| hs1086 | chr20:39334182-39335059 | yes | no | yes | hindbrain (rhombencephalon)[5/8] |
| hs1234 | chr20:39347264-39348213 | yes | no | no | |
| hs1101 | chr20:39472648-39473702 | yes | no | no | |
| hs996 | chr20:39483347-39484593 | yes | no | no | |
| hs1548 | chr21:34221456-34223948 | yes | yes | yes | forebrain[6/6] |
| hs1188 | chr21:34290782-34292115 | yes | yes | yes | neural tube[3/3] \| hindbrain |
| | | | | | (rhombencephalon)[3/3] \| midbrain |
| | | | | | (mesencephalon)[3/3] \| forebrain[3/3] |
| hs1559 | chr22:46240915-46242300 | no | yes | yes | neural tube[13/14] \| forebrain[13/14] |
| hs1043 | chr3:147125146-147126336 | yes | no | yes | neural tube[9/10] \| hindbrain |
| | | | | | (rhombencephalon)[9/10] |
| hs1173 | chr3:147378547-147380603 | yes | no | yes | neural tube[7/7] \| hindbrain |
| | | | | | (rhombencephalon)[7/7] |
| hs1184 | chr3:147393021-147394349 | yes | no | no | |
| hs1573 | chr3:147563409-147566604 | yes | yes | yes | hindbrain (rhombencephalon)[6/9] \| |
| | | | | | midbrain (mesencephalon)[6/9] \| |
| | | | | | forebrain[9/9] |
| hs1224 | chr3:147651676-147653436 | yes | yes | yes | forebrain[5/10] |
| hs1038 | chr3:147748015-147749579 | yes | no | no | |
| hs1549 | chr3:147753310-147755618 | no | no | no | |
| hs1203 | chr3:147802357-147803586 | yes | no | yes | neural tube[5/7] \| hindbrain |
| | | | | | (rhombencephalon)[5/7] |
| hs1115 | chr3:148006499-148007810 | yes | no | yes | midbrain (mesencephalon)[5/7] |
| hs636 | chr3:157882303-157883963 | yes | yes | yes | forebrain[7/11] \| limb[4/11] |
| hs1712 | chr3:173448118-173452132 | yes | no | no | |
| hs192 | chr3:180773639-180775802 | yes | yes | yes | forebrain[6/8] |
| hs1563 | chr3:193489359-193491333 | yes | yes | yes | midbrain (mesencephalon)[5/5] \| |
| | | | | | forebrain[5/5] |
| hs1543 | chr3:193929360-193931457 | no | yes | yes | neural tube[10/11] \| hindbrain |
| | | | | | (rhombencephalon)[11/11] \| midbrain |
| | | | | | (mesencephalon)[10/11] \| |
| | | | | | forebrain[10/11] |
| hs1557 | chr3:28033828-28035751 | yes | yes | yes | hindbrain (rhombencephalon)[8/8] \| |
| | | | | | midbrain (mesencephalon)[8/8] \| dorsal |
| | | | | | root ganglion[6/8] \| forebrain[8/8] \| |
| | | | | | trigeminal V (ganglion, cranial)[8/8] |
| hs1214 | chr3:70701489-70702904 | yes | no | no | |
| hs1231 | chr3:71026229-71026764 | yes | no | no | |
| hs965 | chr3:71099157-71100851 | yes | no | yes | limb[5/7] \| other[6/7] |
| hs1092 | chr3:71153556-71155053 | yes | yes | yes | forebrain[4/5] |
| hs1572 | chr3:71186391-71188583 | yes | no | no | |
| hs1160 | chr3:71253670-71255013 | yes | no | no | |
| hs187 | chr3:71290418-71292584 | yes | yes | yes | forebrain[8/9] |
| hs1116 | chr3:71446827-71448809 | yes | no | yes | facial mesenchyme[4/7] |
| hs997 | chr3:71499477-71500970 | yes | no | no | |
| hs973 | chr3:71507469-71508874 | yes | no | no | |
| hs1149 | chr3:71573607-71574540 | yes | no | yes | neural tube[5/10] |
| hs1010 | chr3:71590897-71592786 | yes | no | no | |
| hs1545 | chr4:109254340-109257033 | no | yes | yes | midbrain (mesencephalon)[8/8] \| |
| | | | | | forebrain[8/8] |
| hs1050 | chr4:109531908-109533465 | yes | yes | yes | forebrain[4/5] \| other[3/5] |
| hs981 | chr4:113442390-113443530 | yes | yes | yes | hindbrain (rhombencephalon)[5/6] \| |
| | | | | | midbrain (mesencephalon)[5/6] \| |
| | | | | | forebrain[5/6] |
| hs1582 | chr4:124383428-124386454 | no | no | yes | hindbrain (rhombencephalon)[6/8] \| |
| | | | | | midbrain (mesencephalon)[6/8] \| facial |
| | | | | | mesenchyme[4/8] |
| hs1525 | chr4:124775814-124779530 | no | no | yes | limb[5/10] \| heart[6/10] |
| hs840 | chr4:66989480-66990366 | yes | yes | yes | forebrain[10/10] |
| hs1130 | chr5:157589029-157590477 | yes | no | yes | limb[6/10] |
| hs1208 | chr5:158017768-158019067 | yes | no | yes | limb[9/10] \| branchial arch[9/10] |
| hs1137 | chr5:158227696-158229500 | yes | no | no | |
| hs1022 | chr5:158486120-158487498 | yes | yes | yes | neural tube[10/11] \| hindbrain |
| | | | | | (rhombencephalon)[10/11] \| midbrain |
| | | | | | (mesencephalon)[9/11] \| dorsal root |
| | | | | | ganglion[8/11] \| forebrain[6/11] \| |
| | | | | | trigeminal V (ganglion, cranial)[10/11] \| |
| | | | | | cranial nerve[9/11] |
| hs1117 | chr5:158508842-158510137 | yes | yes | yes | neural tube[7/8] \| hindbrain |
| | | | | | (rhombencephalon)[7/8] \| forebrain[7/8] |
| hs1123 | chr5:158517785-158518914 | yes | no | yes | cranial nerve[5/9] |
| hs1187 | chr5:50390899-50392257 | yes | yes | yes | hindbrain (rhombencephalon)[5/7] \| |
| | | | | | forebrain[7/7] \| eye[5/7] |
| hs853 | chr5:87083012-87084752 | yes | yes | yes | forebrain[7/7] |
| hs989 | chr5:90768370-90769843 | yes | no | no | |
| hs982 | chr5:90785763-90787167 | yes | no | no | |
| hs1227 | chr5:91271776-91272886 | yes | no | yes | midbrain (mesencephalon)[4/] |
| hs952 | chr5:91442456-91444549 | yes | yes | yes | neural tube[11/12] \| hindbrain |
| | | | | | (rhombencephalon)[9/12] \| midbrain |
| | | | | | (mesencephalon)[12/12] \| dorsal root |
| | | | | | ganglion[12/12] \| forebrain[9/12] \| |
| | | | | | eye[12/12] \| trigeminal V (ganglion, |
| | | | | | cranial)[11/12] \| facial |
| | | | | | mesenchyme[2/12] |
| hs1034 | chr5:91700124-91701467 | yes | no | no | |
| hs1084 | chr5:91765018-91766129 | yes | no | no | |
| hs1162 | chr5:91828131-91829295 | yes | no | no | |
| hs1577 | chr5:91927845-91931024 | yes | yes | yes | midbrain (mesencephalon)[6/11] \| |
| | | | | | forebrain[10/11] |
| hs1109 | chr5:91940922-91942042 | yes | no | yes | limb[10/11] |
| hs971 | chr5:91970162-91972034 | yes | yes | yes | neural tube[6/8] \| forebrain[6/8] \| cranial |
| | | | | | nerve[6/8] |
| hs1039 | chr5:92031088-92033197 | yes | no | yes | limb[3/7] \| cranial nerve[7/7] |
| hs1155 | chr5:92035493-92036961 | yes | no | no | |
| hs1079 | chr5:92141511-92143537 | yes | no | yes | neural tube[6/9] \| hindbrain |
| | | | | | (rhombencephalon)[7/9] \| midbrain |
| | | | | | (mesencephalon)[7/9] |
| hs1153 | chr5:92219848-92221133 | yes | no | yes | branchial arch[3/10] \| eye[7/10] |
| hs1024 | chr5:92312840-92314645 | yes | yes | yes | forebrain[8/9] |
| hs1049 | chr5:92314781-92316083 | yes | no | yes | other[7/8] |
| hs1146 | chr5:92426546-92428433 | yes | no | no | |
| hs1560 | chr5:92476842-92479105 | yes | no | no | |
| hs1170 | chr5:92526066-92527353 | yes | no | yes | eye[8/8] |
| hs1222 | chr5:92536353-92537380 | yes | no | no | |
| hs1060 | chr5:92613862-92616844 | yes | yes | yes | hindbrain (rhombencephalon)[6/14] \| |
| | | | | | forebrain[10/14] |
| hs1172 | chr5:92634702-92636476 | yes | yes | yes | forebrain[9/11] \| eye[9/11] |
| hs1550 | chr5:92741502-92744743 | yes | no | no | |
| hs1033 | chr6:108435330-108436506 | yes | no | no | |
| hs1189 | chr6:108437243-108438452 | yes | no | no | |
| hs1052 | chr6:18536628-18538267 | yes | yes | yes | forebrain[7/13] \| branchial arch[7/13] \| |
| | | | | | cranial nerve[9/13] \| other[8/13] |
| hs1580 | chr6:18612650-18614840 | no | no | no | |
| hs1094 | chr6:18662790-18664038 | yes | no | no | |
| hs1542 | chr6:19533421-19535679 | no | no | no | |
| hs1533 | chr6:19719222-19722910 | yes | yes | yes | midbrain (mesencephalon)[5/7] \| |
| | | | | | forebrain[6/7] \| eye[5/7] |
| hs1175 | chr6:19976157-19977513 | yes | yes | yes | forebrain[4/8] \| nose[7/8] |
| hs1225 | chr6:41380559-41381515 | yes | no | no | |
| hs1003 | chr6:41434455-41435695 | yes | no | no | |
| hs1145 | chr6:41436815-41438024 | yes | no | no | |
| hs1100 | chr6:41560717-41562075 | yes | yes | yes | hindbrain (rhombencephalon)[7/8] \| |
| | | | | | midbrain (mesencephalon)[8/8] \| |
| | | | | | forebrain[7/8] \| other[6/8] |
| hs978 | chr6:97754043-97755513 | yes | yes | yes | forebrain[3/4] |
| hs1564 | chr6:97912825-97915982 | no | yes | yes | forebrain[6/7] \| other[3/7] |
| hs1059 | chr6:97948958-97949898 | yes | no | no | |
| hs1035 | chr6:98074091-98075722 | yes | yes | yes | forebrain[8/8] \| limb[3/8] |
| hs1220 | chr6:98212329-98214701 | yes | no | yes | branchial arch[4/5] |
| hs1054 | chr6:98261649-98263117 | yes | no | no | |
| hs995 | chr6:98278782-98280694 | yes | no | no | |
| hs985 | chr6:98382462-98383929 | yes | no | no | |
| hs1233 | chr6:98504034-98506058 | yes | no | yes | neural tube[3/4] \| other[4/4] |
| hs1106 | chr6:98572398-98573780 | yes | no | no | |
| hs128 | chr6:98829860-98831049 | yes | yes | yes | forebrain[4/6] |
| hs1159 | chr6:98831075-98833042 | yes | no | no | |
| hs1081 | chr6:98902034-98904516 | yes | no | yes | hindbrain (rhombencephalon)[6/9] |
| hs1014 | chr6:99005894-99007499 | yes | no | no | |
| hs1085 | chr6:99089361-99091043 | yes | yes | yes | neural tube[7/9] \| midbrain |
| | | | | | (mesencephalon)[5/9] \| forebrain[7/9] |
| hs1069 | chr7:114052100-114053403 | yes | no | no | |
| hs1167 | chr7:114055419-114056748 | yes | no | no | |
| hs999 | chr7:114142132-114143527 | yes | no | yes | midbrain (mesencephalon)[4/6] \| facial |
| | | | | | mesenchyme[4/6] |
| hs1080 | chr7:114261073-114263089 | yes | no | yes | ear[3/5] |
| hs954 | chr7:114287987-114290557 | yes | no | no | |
| hs1215 | chr7:114292966-114293972 | yes | no | no | |
| hs956 | chr7:114299711-114302078 | yes | yes | yes | midbrain (mesencephalon)[3/7] \| |
| | | | | | forebrain[6/7] |
| hs966 | chr7:114326912-114329772 | yes | no | yes | hindbrain (rhombencephalon)[6/11] |
| hs1192 | chr7:114463797-114464462 | yes | no | yes | hindbrain (rhombencephalon)[5/5] \| |
| | | | | | midbrain (mesencephalon)[3/5] |
| hs1019 | chr7:20838843-20840395 | yes | yes | yes | forebrain[4/6] |
| hs1007 | chr7:20997668-20999102 | yes | yes | yes | forebrain[3/3] \| facial mesenchyme[3/3] |
| hs1148 | chr7:21019551-21021200 | yes | no | yes | limb[4/4] |
| hs1226 | chr7:21080801-21082086 | yes | yes | yes | neural tube[12/16] \| hindbrain |
| | | | | | (rhombencephalon)[12/16] \| midbrain |
| | | | | | (mesencephalon)[13/16] \| |
| | | | | | forebrain[14/16] \| eye[12/16] \| cranial |
| | | | | | nerve[10/16] |
| hs1223 | chr7:21239775-21240922 | yes | no | no | |
| hs807 | chr7:22091362-22092557 | no | yes | yes | forebrain[8/9] |
| hs1586 | chr7:42185602-42187508 | yes | no | yes | limb[3/3] |
| hs1213 | chr7:42252831-42254560 | yes | yes | yes | hindbrain (rhombencephalon)[5/6] \| |
| | | | | | midbrain (mesencephalon)[5/6] \| |
| | | | | | forebrain[3/6] |
| hs1132 | chr7:42432266-42433365 | yes | no | no | |
| hs961 | chr7:50333048-50334464 | yes | no | no | |
| hs972 | chr7:50357638-56358644 | yes | no | no | |
| hs782 | chr8:21901089-21902326 | yes | yes | yes | hindbrain (rhombencephalon)[10/13] \| |
| | | | | | midbrain (mesencephalon)[10/13] \| |
| | | | | | forebrain[9/13] \| tail[6/13] |
| hs781 | chr8:21907426-21908282 | no | yes | yes | forebrain[10/12] |
| hs1719 | chr8:32063683-32067187 | no | no | no | |
| hs1718 | chr8:33660674-33665591 | yes | no | no | |
| hs1715 | chr8:33891203-33892738 | no | no | yes | neural tube[4/6] \| dorsal root ganglion[6/6] |
| | | | | | \| trigeminal V (ganglion, cranial)[6/6] \| |
| | | | | | cranial nerve[6/6] |
| hs631 | chr8:36957851-36958723 | yes | yes | yes | forebrain[6/7] \| cranial nerve[7/7] |
| hs1030 | chr9:128516934-128518372 | yes | no | yes | hindbrain (rhombencephalon)[6/7] \| |
| | | | | | midbrain (mesencephalon)[6/7] |
| hs818 | chr9:128520992-128522653 | yes | yes | yes | forebrain[6/6] |
| hs1102 | chr9:128522875-128525442 | yes | no | yes | branchial arch[3/7] |
| hs983 | chr9:128525348-128527214 | yes | no | no | |
| hs1099 | chr9:128606519-128608350 | yes | no | no | |
| hs1095 | chr9:128640165-128641327 | yes | no | no | |
| hs1017 | chr9:128645462-128647097 | yes | yes | yes | forebrain[7/9] |
| hs1000 | chr9:128666411-128667552 | yes | no | no | |
| hs1103 | chr9:128735158-128736174 | yes | no | no | |
| hs987 | chr9:128869446-128870934 | yes | yes | yes | forebrain[4/5] |
| hs1015 | chr9:128919674-128920432 | yes | no | yes | midbrain (mesencephalon)[4/7] |
| hs1108 | chr9:128945054-128946417 | yes | no | no | |
| hs876 | chr9:133540555-133541228 | yes | yes | yes | neural tube[7/11] \| hindbrain |
| | | | | | (rhombencephalon)[7/11] \| midbrain |
| | | | | | (mesencephalon)[7/11] \| forebrain[7/11] |
| hs1530 | chr9:81010879-81014103 | yes | yes | yes | forebrain[3/3] \| limb[3/3] |
| hs1585 | chr9:81052204-81055820 | yes | yes | yes | neural tube[3/4] \| hindbrain |
| | | | | | (rhombencephalon)[3/4] \| midbrain |
| | | | | | (mesencephalon)[3/4] \| dorsal root |
| | | | | | ganglion[3/4] \| forebrain[3/4] \| eye[3/4] \| |
| | | | | | cranial nerve[3/4] \| nose[3/41 |
| hs1041 | chr9:82010246-82011547 | yes | yes | yes | neural tube[7/7] \| hindbrain |
| | | | | | (rhombencephalon)[7/7] \| midbrain |
| | | | | | (mesencephalon)[6/7] \| forebrain[7/7] |
| hs1074 | chr9:82119097-82120855 | yes | no | no | |
| hs1078 | chr9:82224085-82226757 | yes | yes | yes | neural tube[7/8] \| hindbrain |
| | | | | | (rhombencephalon)[7/8] \| midbrain |
| | | | | | (mesencephalon)[7/8] \| forebrain[7/8] \| |
| | | | | | cranial nerve[7/8] |
| hs1026 | chr9:82244801-82246758 | yes | no | no | |
| hs1183 | chr9:82266057-82267053 | yes | no | no | |
| hs1587 | chr9:82274254-82276353 | no | no | no | |
| hs1163 | chr9:82590314-82593174 | yes | no | yes | branchial arch[6/11] \| trigeminal V |
| | | | | | (ganglion, cranial)[8/11] \| cranial |
| | | | | | nerve[8/11] |
| hs1004 | chr9:82681268-82682692 | yes | no | yes | hindbrain (rhombencephalon)[7/10] \| |
| | | | | | midbrain (mesencephalon)[8/10] \| |
| | | | | | limb[4/10] \| branchial arch[3/10] \| |
| | | | | | nose[5/10] |
| hs1211 | chr9:83122286-83123599 | yes | no | no | |
| hs974 | chr9:83412700-83413972 | yes | no | yes | other[4/7] |
| hs1228 | chr9:83711693-83712782 | yes | no | no | |
| hs1118 | chr9:84167351-84168176 | yes | yes | yes | forebrain[6/7] \| branchial arch[4/7] |
| hs1029 | chrX:82765974-82767821 | yes | no | no | |

TABLE 6

| Genes | | | Anatomical Domains and Subdomains | | | | | | | | | |
|---|---|---|---|---|---|---|---|---|---|---|---|---|
| Gene | | | EMT | | | CP | MP | | | DP | | |
| Nam [symbol] | ISH data source | stage* | VZ | SVZ | MZ | VZ | VZ | SVZ | MZ | VZ | SVZ | MZ |
| Arx | Allen Brain Atlas | e11.5 | x | x | x | | x | | | x | | |
| Ascl1 | Allen Brain Atlas | e11.5 | | | | | | | | x | | |
| Bcl11a | Allen Brain Atlas | e13.5 | x | x | x | | x | x | x | x | x | x |
| Bcl11b | Allen Brain Atlas | e13.5 | | | | | | | x | | x | x |
| Cux1 | Allen Brain Atlas | e11.5 | | | | | x | | | x | | |
| Cux2 | Allen Brain Atlas | e13.5 | | | | x | | | | | | |
| Dbx1 | Allen Brain Atlas | e11.5 | x | | | | | | | | | |
| Dlx1 | J. Rubenstein** | e12.5 | | | | | | | | | | |
| Dlx2 | J. Rubenstein** | e12.5 | | | | | | | | | | |
| Dlx5 | Allen Brain Atlas | e11.5 | | | | | | | | | | |
| Dlx6 | Allen Brain Atlas | e11.5 | | | | | | | | | | |
| Ebf1 | Allen Brain Atlas | e11.5 | | | | | | | | | | |
| Ebf3 | Allen Brain Atlas | e11.5 | | | | | | | | | | x |
| Egr3 | J. Rubenstein** | e15.5 | | | | | | | | | | |
| Emx1 | J. Rubenstein** | e11.5 | | | | | x | x | x | x | x | x |
| Emx2 | Allen Brain Atlas | e11.5 | x | x | x | | x | x | | x | x | |
| Eomes | Allen Brain Atlas | e11.5 | | x | x | | | x | x | | x | x |
| Esrrg | Allen Brain Atlas | e11.5 | | | | | | | | | | |
| Etv1 | J. Rubenstein** | e12.5 | | | | | | | | x | | |
| Etv5 | Allen Brain Atlas | e11.5 | | | | | | | | x | | |
| Fezf1 | J. Rubenstein** | e15.5 | | | | | | | | | | |
| Fezf2 | Allen Brain Atlas | e11.5 | x | x | x | | x | x | x | x | x | x |
| Foxg1 | Allen Brain Atlas | e11.5 | | | | | | | | x | x | x |
| Foxp1 | Allen Brain Atlas | e11.5 | | | | | | | | x | | |
| Foxp2 | Allen Brain Atlas | e11.5 | | | | | | | | | | |
| Foxp4 | Allen Brain Atlas | e11.5 | x | x | x | x | x | x | x | x | x | x |
| Gbx1 | J. Rubenstein** | e12.5 | | | | | | | | | | |
| Gbx2 | Allen Brain Atlas | e11.5 | | | | | | | | | | |
| Gli1 | Allen Brain Atlas | e11.5 | | | | | | | | | | |
| Gli3 | Allen Brain Atlas | e11.5 | x | | | | x | x | | x | x | |
| Gsx1 | Allen Brain Atlas | e11.5 | | | | | | | | | | |
| Gsx2 | Allen Brain Atlas | e11.5 | | | | | | | | | | |
| Hes1 | Allen Brain Atlas | e11.5 | x | x | | | x | x | | x | x | |
| Hes5 | Allen Brain Atlas | e11.5 | x | x | | | x | x | | x | x | |
| Hey1 | Allen Brain Atlas | e13.5 | | | | | x | x | | x | x | |
| Hmx3 | Allen Brain Atlas | e11.5 | | | | | | | | | | |
| Id1 | Allen Brain Atlas | e11.5 | | | | x | x | x | | | | |
| Id2 | Allen Brain Atlas | e11.5 | x | x | | x | x | x | | x | x | |
| Id4 | Allen Brain Atlas | e11.5 | x | x | | | | | | x | x | x |
| Ikzf1 | Allen Brain Atlas | e13.5 | | | | | | | | | | |
| Isl1 | Allen Brain Atlas | e11.5 | | | | | | | | | | |
| Lef1 | Allen Brain Atlas | e13.5 | x | | | x | x | x | | x | x | x |
| Lhx1 | Allen Brain Atlas | e11.5 | | | x | | | | | | | |
| Lhx2 | Allen Brain Atlas | e11.5 | | | x | | | | | x | x | x |
| Lhx5 | Allen Brain Atlas | e11.5 | x | x | x | x | | | | | | |
| Lhx6 | J. Rubenstein** | e11.5 | | | | | | | | | | |
| Lhx8 | Allen Brain Atlas | e11.5 | | | | | | | | | | |
| Lhx9 | Allen Brain Atlas | e11.5 | x | x | x | x | x | x | x | x | x | x |
| Lmo1 | Allen Brain Atlas | e11.5 | | | | | | | | | | |
| Lmo3 | Allen Brain Atlas | e11.5 | | | | | | | | | | |
| Lmo4 | Allen Brain Atlas | e13.5 | x | x | x | x | x | x | x | x | x | x |
| Mafb | Allen Brain Atlas | e11.5 | | | | | x | | | x | | |
| Mef2c | Allen Brain Atlas | e13.5 | | | | | | | | | | x |
| Meis1 | J. Rubenstein** | e15.5 | | | | | | | | | | |
| Meis2 | Allen Brain Atlas | e13.5 | | | | | x | x | | x | x | |
| Neurod1 | Allen Brain Atlas | e13.5 | | x | | | | x | | | x | |
| Neurod4 | Allen Brain Atlas | e13.5 | | | | | | | | | x | |
| Neurod6 | Allen Brain Atlas | e11.5 | | | | | | | | | | x |
| Neurog1 | Allen Brain Atlas | e11.5 | x | x | | | | | | x | x | x |
| Neurog2 | Allen Brain Atlas | e11.5 | x | x | | | x | x | | x | x | x |
| Nhlh1 | Allen Brain Atlas | e11.5 | | | x | | | | x | | | x |
| Nhlh2 | Allen Brain Atlas | e11.5 | | | x | | | | x | | | x |
| Nkx2-1 | Allen Brain Atlas | e11.5 | | | | | | | | | | |
| Nkx6-2 | J. Rubenstein** | e11.5 | | | | | | | | | | |
| Npas1 | Allen Brain Atlas | e11.5 | | | | | | | | | | |
| Nr2e1 | Allen Brain Atlas | e11.5 | x | x | x | | x | x | | x | x | |
| Nr2f1 | Allen Brain Atlas | e11.5 | x | x | | | x | x | | x | x | x |
| Nr2f2 | Allen Brain Atlas | e11.5 | x | x | | | x | x | | | | |
| Olig1 | J. Rubenstein** | e12.5 | | | | | | | | | | |
| Olig2 | Allen Brain Atlas | e11.5 | | | | | | | | | | |
| Otx1 | Allen Brain Atlas | e11.5 | | x | | | | | | x | x | |
| Otx2 | Allen Brain Atlas | e11.5 | x | x | | x | | | | | | |
| Pax6 | J. Rubenstein** | e12.5 | x | | | | x | | | x | | |
| Pbx1 | J. Rubenstein** | e12.5 | | | | | x | | | x | x | x |
| Pbx2 | Allen Brain Atlas | e11.5 | x | | | x | x | x | x | x | x | x |
| Pbx3 | Allen Brain Atlas | e11.5 | | | | | | | | | | |
| Pou3f1 | J. Rubenstein** | e12.5 | | | | | | | | | x | x |
| Pou3f2 | Allen Brain Atlas | e11.5 | x | x | | | x | x | x | x | x | x |
| Pou3f3 | J. Rubenstein** | e11.5 | | | | | | | | | | |
| Pou3f4 | Allen Brain Atlas | e11.5 | | | | | | | | | | |
| Prox1 | Allen Brain Atlas | e13.5 | | | | | x | x | x | | | |
| Rara | Allen Brain Atlas | e11.5 | | | | | x | x | | x | x | |
| Rarb | Allen Brain Atlas | e11.5 | | | | | | | | | | |
| Rorb | J. Rubenstein** | e15.5 | | | | | | | | | | x |
| Rxra | Allen Brain Atlas | e11.5 | | x | | | | | | x | x | |
| Rxrb | Allen Brain Atlas | e11.5 | x | x | | | x | x | | x | x | |
| Rxrg | Allen Brain Atlas | e11.5 | | | | | | | | | | |
| Sall3 | J. Rubenstein** | e15.5 | | | | | | | | x | | |
| Six3 | Allen Brain Atlas | e11.5 | | x | | | x | x | | x | x | |
| Sox1 | J. Rubenstein** | e15.5 | x | | | | x | x | | x | x | |
| Sox10 | J. Rubenstein** | e12.5 | | | | | | | | | | |
| Sox11 | Allen Brain Atlas | e11.5 | | | | | | | | | | |
| Sox4 | J. Rubenstein** | e15.5 | | | | | | x | x | | x | x |
| Sp8 | J. Rubenstein** | e12.5 | | | | | x | | | x | | |
| Sp9 | J. Rubenstein** | e12.5 | | | | | x | | | | | |
| Tbr1 | J. Rubenstein** | e12.5 | | | | | | | x | | | x |
| Tcf3 | Allen Brain Atlas | e11.5 | | | | | | | | x | x | |
| Tcf4 | Allen Brain Atlas | e11.5 | | x | | | x | x | x | x | x | x |
| Tle1 | Allen Brain Atlas | e13.5 | | x | x | x | x | x | x | x | x | x |
| Tle3 | Allen Brain Atlas | e11.5 | x | x | | x | x | x | | x | x | |
| Tle4 | Allen Brain Atlas | e11.5 | x | x | | | | | | x | x | |
| Tshz1 | Allen Brain Atlas | e11.5 | | | | | x | x | x | x | x | x |
| Tshz2 | J. Rubenstein** | e15.5 | | | | | | | | | | x |
| Vax1 | J. Rubenstein** | e12.5 | | | | | | | | | | |
| Zfhx1a | Allen Brain Atlas | e11.5 | x | x | | | x | x | | x | x | |
| Zfhx1b | Allen Brain Atlas | e13.5 | x | x | | x | x | x | x | x | x | x |
| Zfhx2 | Allen Brain Atlas | e11.5 | | | | | | | x | | | x |
| Zfhx3 | J. Rubenstein** | e15.5 | | x | x | | | | | | | |
| Zfhx4 | Allen Brain Atlas | e11.5 | | | x | | x | | | x | | |
| Zfp503 | J. Rubenstein** | e11.5 | | | | | | | | | | |
| Zfp521 | J. Rubenstein** | e15.5 | | | | | | | x | | | x |
| Zic1 | Allen Brain Atlas | e11.5 | x | x | | | x | x | | | | |
| Zic5 | Allen Brain Atlas | e11.5 | x | x | | | x | x | | x | x | |

| Genes | Anatomical Domains and Subdomains | | | | | | | | | | |
|---|---|---|---|---|---|---|---|---|---|---|---|
| Gene | LP | | | VP | | | LGE | | | MGE | |
| Nam [symbol] | VZ | SVZ | MZ | VZ | SVZ | MZ | VZ | SVZ | MZ | VZ | SVZ |
| Arx | x | | | x | | | | x | x | | x |
| Ascl1 | x | | | x | | | x | x | | x | x |
| Bcl11a | x | x | x | | x | x | x | x | x | | x |
| Bcl11b | | x | x | | x | x | | x | x | | x |
| Cux1 | x | | | x | | | x | | | x | x |
| Cux2 | | | x | | | x | | x | x | | x |
| Dbx1 | | | | x | | | | | | | |
| Dlx1 | | | | | | | x | x | x | x | x |
| Dlx2 | | | | | | | x | x | | x | x |
| Dlx5 | | | | | | | | x | x | | x |
| Dlx6 | | | | | | | | | x | | |
| Ebf1 | | | | | | | | | x | | |
| Ebf3 | | | x | | | x | | | | | |
| Egr3 | | | | | | | | | x | | |
| Emx1 | x | x | x | | | | | | | | |
| Emx2 | x | x | | x | x | | x | x | x | | |
| Eomes | | x | x | | x | x | | | | | |
| Esrrg | | | | | | | | | | | |
| Etv1 | x | | | x | | | x | x | x | x | x |
| Etv5 | x | | | x | x | x | x | | | | |
| Fezf1 | | | | | | | | | | | |
| Fezf2 | x | x | x | x | x | x | | | | | |
| Foxg1 | x | x | x | x | x | x | x | x | x | x | x |
| Foxp1 | x | | | x | | | | | | | |
| Foxp2 | | | | | | | | | x | | |
| Foxp4 | | | x | | | x | x | x | x | x | |
| Gbx1 | | | | | | | | | | | |
| Gbx2 | | | | | | | | | | | |
| Gli1 | | | | | | | x | | | | |
| Gli3 | x | x | | x | x | | x | x | | x | x |
| Gsx1 | | | | | | | | | | x | x |
| Gsx2 | | | | | | | x | x | x | x | x |
| Hes1 | x | x | | x | x | | x | x | | x | x |
| Hes5 | x | x | | x | x | | x | x | | x | x |
| Hey1 | x | x | | | | | x | | | | |
| Hmx3 | | | | | | | | | | | |
| Id1 | | | | | | | | | | | |
| Id2 | x | x | | x | x | | | | | | |
| Id4 | x | x | x | x | x | x | x | x | x | x | x |
| Ikzf1 | | | | | | | | | | | |
| Isl1 | | | | | | | | x | x | | x |
| Lef1 | x | x | x | x | x | | x | | | x | |
| Lhx1 | | | | | | | | | x | | |
| Lhx2 | x | x | x | x | x | x | x | x | | x | x |
| Lhx5 | | | | | | | | | | | |
| Lhx6 | | | | | | | | | | | x |
| Lhx8 | | | | | | | | | | | x |
| Lhx9 | x | x | x | x | x | x | x | x | x | x | x |
| Lmo1 | | | | | | | x | x | | x | x |
| Lmo3 | | | | | | | | | | x | x |
| Lmo4 | x | x | x | x | x | x | x | x | x | x | x |
| Mafb | x | | | x | | | | | | | x |
| Mef2c | | | x | | | x | | | x | | |
| Meis1 | x | | | x | | | x | x | x | | |
| Meis2 | x | x | | x | x | | x | x | x | x | x |
| Neurod1 | | x | | | x | | | | | | |
| Neurod4 | | x | | | x | | | | | | |
| Neurod6 | | | x | | | x | | | | | |
| Neurog1 | x | x | x | x | x | x | | | | | |
| Neurog2 | x | x | x | x | x | x | | | | | |
| Nhlh1 | | | x | | | x | | | | | |
| Nhlh2 | | | x | | | x | | | x | | |
| Nkx2-1 | | | | | | | | | | x | x |
| Nkx6-2 | | | | | | | | | | x | x |
| Npas1 | | | | | | | | | | | |
| Nr2e1 | x | x | | x | x | | x | x | | x | x |
| Nr2f1 | x | x | x | x | | | | | | x | x |
| Nr2f2 | | | | | | | | | | | |
| Olig1 | | | | | | | | | | x | |
| Olig2 | | | | | | | x | | | x | |
| Otx1 | x | x | x | x | x | x | | | | | |
| Otx2 | | | | | | | x | x | | x | x |
| Pax6 | x | | | x | | | x | | x | | |
| Pbx1 | x | x | x | x | x | x | x | x | x | | x |
| Pbx2 | x | x | x | x | x | x | x | x | x | x | x |
| Pbx3 | | | | | | x | | | x | | x |
| Pou3f1 | | x | x | | x | x | | x | x | | x |
| Pou3f2 | x | x | x | x | x | x | x | x | x | x | x |
| Pou3f3 | | | | | | | | | | | |
| Pou3f4 | | | | | | | | | | x | x |
| Prox1 | | | | | | | | | | | x |
| Rara | x | x | | x | x | | x | x | | | x |
| Rarb | | | | | | | | | | | |
| Rorb | | | x | | | | x | | | x | |
| Rxra | x | x | | x | x | | x | x | | x | x |
| Rxrb | x | x | | x | x | | x | x | | x | x |
| Rxrg | | | | | | | | | | | |
| Sall3 | x | | | x | | | x | x | | x | |
| Six3 | x | x | | x | x | | x | x | x | x | x |
| Sox1 | x | x | | x | x | | x | x | x | x | x |
| Sox10 | | | | | | | | | | x | x |
| Sox11 | | | | | | | | | | | |
| Sox4 | | x | x | | x | x | | x | | | x |
| Sp8 | | | | | | | | x | x | | x |
| Sp9 | | | | | | | | x | | | x |
| Tbr1 | | | x | | | x | | | | | |
| Tcf3 | x | x | | x | x | | x | x | | x | x |
| Tcf4 | x | x | x | x | x | x | | | | x | x |
| Tle1 | x | x | x | x | x | x | x | x | x | x | x |
| Tle3 | x | x | | x | x | | x | x | | x | x |
| Tle4 | x | x | | x | x | x | x | x | x | | |
| Tshz1 | x | x | x | x | x | x | | x | | x | |
| Tshz2 | | | | | | | | x | x | | x |
| Vax1 | | | | | | | x | x | | x | x |
| Zfhx1a | x | x | | x | x | | x | x | | x | x |
| Zfhx1b | x | x | x | x | x | x | x | x | x | x | x |
| Zfhx2 | | | x | | | x | | | x | | |
| Zfhx3 | | | | | | | | x | x | | |
| Zfhx4 | x | | | x | | | x | x | x | | |
| Zfp503 | | | | | | | | x | x | | |
| Zfp521 | | | | | | | | | x | | |
| Zic1 | | | | x | x | | x | x | | | |
| Zic5 | x | x | | x | x | | x | x | x | | |

| Genes | | | Anatomical Domains and Subdomains | | | | | | | |
|---|---|---|---|---|---|---|---|---|---|---|
| Gene | | | | POA | | | Se | | | |
| Nam [symbol] | ISH data source | stage* | MZ | VZ | SVZ | MZ | VZ | SVZ | MZ | Comments |
| Arx | Allen Brain Atlas | e11.5 | x | | | x | | | | |
| Ascl1 | Allen Brain Atlas | e11.5 | | x | x | | x | x | | weak expression in pallial VZ/SVZ |
| Bcl11a | Allen Brain Atlas | e13.5 | x | | | x | | | x | |
| Bcl11b | Allen Brain Atlas | e13.5 | x | | | x | | | | |
| Cux1 | Allen Brain Atlas | e11.5 | | | | | x | | | |
| Cux2 | Allen Brain Atlas | e13.5 | x | | | x | | | x | |
| Dbx1 | Allen Brain Atlas | e11.5 | | | | | | | | |
| Dlx1 | J. Rubenstein** | e12.5 | x | x | x | x | | x | x | |
| Dlx2 | J. Rubenstein** | e12.5 | | x | x | | x | x | | |
| Dlx5 | Allen Brain Atlas | e11.5 | x | | x | x | | | x | |
| Dlx6 | Allen Brain Atlas | e11.5 | x | | | | | | | |
| Ebf1 | Allen Brain Atlas | e11.5 | | | | | | | | also expressed in the MP of the very |
| | | | | | | | | | | rostral cortex |
| Ebf3 | Allen Brain Atlas | e11.5 | | | | | | | | |
| Egr3 | J. Rubenstein** | e15.5 | | | | | | | | |
| Emx1 | J. Rubenstein** | e11.5 | | | | | | | | |
| Emx2 | Allen Brain Atlas | e11.5 | | | | | x | x | x | |
| Eomes | Allen Brain Atlas | e11.5 | | | | | | | | |
| Esrrg | Allen Brain Atlas | e11.5 | | | | | | | | not expressed in brain at e11.5 |
| Etv1 | J. Rubenstein** | e12.5 | x | x | | | x | x | | |
| Etv5 | Allen Brain Atlas | e11.5 | | x | x | x | x | x | x | |
| Fezf1 | J. Rubenstein** | e15.5 | | | | | | | x | also amygdala expression |
| Fezf2 | Allen Brain Atlas | e11.5 | | | | | x | x | x | |
| Foxg1 | Allen Brain Atlas | e11.5 | x | x | x | x | x | x | x | |
| Foxp1 | Allen Brain Atlas | e11.5 | | | | | | | | maybe weak cortex expression |
| Foxp2 | Allen Brain Atlas | e11.5 | x | | | | | | | |
| Foxp4 | Allen Brain Atlas | e11.5 | | x | | | x | | | |
| Gbx1 | J. Rubenstein** | e12.5 | x | | | | | | | |
| Gbx2 | Allen Brain Atlas | e11.5 | x | | | | | | | |
| Gli1 | Allen Brain Atlas | e11.5 | | x | | | | | | |
| Gli3 | Allen Brain Atlas | e11.5 | | x | x | | x | x | | |
| Gsx1 | Allen Brain Atlas | e11.5 | | x | x | x | | | | |
| Gsx2 | Allen Brain Atlas | e11.5 | | | | | x | x | x | |
| Hes1 | Allen Brain Atlas | e11.5 | | x | x | | x | x | | |
| Hes5 | Allen Brain Atlas | e11.5 | | | | | x | x | | |
| Hey1 | Allen Brain Atlas | e13.5 | | | | | | | | |
| Hmx3 | Allen Brain Atlas | e11.5 | | | | | | | | not expressed in brain at e11.5 |
| Id1 | Allen Brain Atlas | e11.5 | | | | | | | | |
| Id2 | Allen Brain Atlas | e11.5 | | | | | x | x | | |
| Id4 | Allen Brain Atlas | e11.5 | x | x | x | x | x | x | x | |
| Ikzf1 | Allen Brain Atlas | e13.5 | | | | | | | | negative at e13.5, may be positive later |
| Isl1 | Allen Brain Atlas | e11.5 | x | | x | x | | | | |
| Lef1 | Allen Brain Atlas | e13.5 | | x | x | x | x | x | x | |
| Lhx1 | Allen Brain Atlas | e11.5 | | | | | | | x | |
| Lhx2 | Allen Brain Atlas | e11.5 | | | | | x | x | x | |
| Lhx5 | Allen Brain Atlas | e11.5 | | | | x | x | x | x | |
| Lhx6 | J. Rubenstein** | e11.5 | x | | | | | | | |
| Lhx8 | Allen Brain Atlas | e11.5 | x | | | | | | | |
| Lhx9 | Allen Brain Atlas | e11.5 | x | x | x | x | x | x | x | |
| Lmo1 | Allen Brain Atlas | e11.5 | | | | | x | x | | early MGE marker |
| Lmo3 | Allen Brain Atlas | e11.5 | | | | | | | | |
| Lmo4 | Allen Brain Atlas | e13.5 | x | x | x | x | x | x | x | |
| Mafb | Allen Brain Atlas | e11.5 | | | | | x | x | | ISH data ambiguous |
| Mef2c | Allen Brain Atlas | e13.5 | x | | | | | | x | |
| Meis1 | J. Rubenstein** | e15.5 | | | | | x | | | |
| Meis2 | Allen Brain Atlas | e13.5 | | | | | x | x | x | |
| Neurod1 | Allen Brain Atlas | e13.5 | | | | | | | x | |
| Neurod4 | Allen Brain Atlas | e13.5 | | | | | | | | |
| Neurod6 | Allen Brain Atlas | e11.5 | | | | | | | | |
| Neurog1 | Allen Brain Atlas | e11.5 | | | | | | x | x | |
| Neurog2 | Allen Brain Atlas | e11.5 | | | | | x | x | | |
| Nhlh1 | Allen Brain Atlas | e11.5 | | | | | | | x | |
| Nhlh2 | Allen Brain Atlas | e11.5 | x | | | | | | x | |
| Nkx2-1 | Allen Brain Atlas | e11.5 | x | x | x | x | x | x | x | |
| Nkx6-2 | J. Rubenstein** | e11.5 | | x | x | x | | | | |
| Npas1 | Allen Brain Atlas | e11.5 | | | | | | | | |
| Nr2e1 | Allen Brain Atlas | e11.5 | | | | | x | x | | |
| Nr2f1 | Allen Brain Atlas | e11.5 | | x | x | | | | | expression is very strong in all layers of |
| | | | | | | | | | | the CGE, and weaker in the LGE proper |
| Nr2f2 | Allen Brain Atlas | e11.5 | | | | | | | | strong caudal-rostral gradient; |
| | | | | | | | | | | expression analysis based on whole- |
| | | | | | | | | | | mount |
| Olig1 | J. Rubenstein** | e12.5 | | x | | | | | | |
| Olig2 | Allen Brain Atlas | e11.5 | | x | | | | | | |
| Otx1 | Allen Brain Atlas | e11.5 | | | | | | | | |
| Otx2 | Allen Brain Atlas | e11.5 | | x | x | | x | x | | |
| Pax6 | J. Rubenstein** | e12.5 | | | | | x | | | |
| Pbx1 | J. Rubenstein** | e12.5 | | | x | | | x | | |
| Pbx2 | Allen Brain Atlas | e11.5 | x | x | x | x | x | x | x | |
| Pbx3 | Allen Brain Atlas | e11.5 | x | | x | | | | | |
| Pou3f1 | J Rubenstein** | e12.5 | x | | x | | | x | | |
| Pou3f2 | Allen Brain Atlas | e11.5 | x | x | x | x | x | x | x | |
| Pou3f3 | J. Rubenstein** | e11.5 | | | | | | | | |
| Pou3f4 | Allen Brain Atlas | e11.5 | x | | | | | | | |
| Prox1 | Allen Brain Atlas | e13.5 | x | | | | | | x | expression in CGE (caudal LGE), and |
| | | | | | | | | | | not clearly in the rostral LGE |
| Rara | Allen Brain Atlas | e11.5 | | | | | | | | |
| Rarb | Allen Brain Atlas | e11.5 | | | | | | | | |
| Rorb | J. Rubenstein** | e15.5 | x | x | x | x | x | | | |
| Rxra | Allen Brain Atlas | e11.5 | | x | x | | | x | | |
| Rxrb | Allen Brain Atlas | e11.5 | x | x | x | x | x | x | | |
| Rxrg | Allen Brain Atlas | e11.5 | | | | | | | | not expressed at e11.5 |
| Sall3 | J. Rubenstein** | e15.5 | | x | | | x | | | |
| Six3 | Allen Brain Atlas | e11.5 | x | x | x | x | x | x | x | |
| Sox1 | J. Rubenstein** | e15.5 | | x | x | | x | x | | |
| Sox10 | J. Rubenstein** | e12.5 | | | | | | | | |
| Sox11 | Allen Brain Atlas | e11.5 | | | | | | | | not expressed at e11.5 |
| Sox4 | J. Rubenstein** | e15.5 | | | x | x | | x | | |
| Sp8 | J. Rubenstein** | e12.5 | | | x | | | x | x | |
| Sp9 | J. Rubenstein** | e12.5 | | x | | | | x | x | |
| Tbr1 | J. Rubenstein** | e12.5 | | | | | | | | |
| Tcf3 | Allen Brain Atlas | e11.5 | | x | x | | x | x | | |
| Tcf4 | Allen Brain Atlas | e11.5 | | | | | x | x | | |
| Tle1 | Allen Brain Atlas | e13.5 | x | x | x | x | x | x | x | |
| Tle3 | Allen Brain Atlas | e11.5 | | x | x | | x | x | | |
| Tle4 | Allen Brain Atlas | e11.5 | x | x | x | | x | x | | |
| Tshz1 | Allen Brain Atlas | e11.5 | | x | | | | | | |
| Tshz2 | J. Rubenstein** | e15.5 | x | | | x | | x | x | |
| Vax1 | J. Rubenstein** | e12.5 | | x | x | | x | x | | |
| Zfhx1a | Allen Brain Atlas | e11.5 | | x | x | | x | x | | |
| Zfhx1b | Allen Brain Atlas | e13.5 | x | x | x | | x | x | | |
| Zfhx2 | Allen Brain Atlas | e11.5 | x | | | | | | x | |
| Zfhx3 | J. Rubenstein** | e15.5 | | | x | x | | x | x | |
| Zfhx4 | Allen Brain Atlas | e11.5 | x | | | | x | x | | |
| Zfp503 | J Rubenstein** | e11.5 | | | | | | | | |
| Zfp521 | J. Rubenstein** | e15.5 | x | | | | | | x | |
| Zic1 | Allen Brain Atlas | e11.5 | x | | | | x | x | x | |
| Zic5 | Allen Brain Atlas | e11.5 | x | x | x | | x | x | x | |

*expression was annotated from e11.5 ISH data or inferred from the closest available stage
**data compiled from:
Long J E, Swan C, Liang W S, Cobos I, Potter G B, Rubenstein J L (2009), J Comp Neurol 512: 556-72
Long J E, Cobos I, Potter G B, Rubenstein J L (2009), Cereb Cortex 19 Suppl 1: i96-106
Flandin P, Zhao Y, Vogt D, Jeong J, Long J, Potter G, Westphal H, Rubenstein J L (2011), Neuron 70: 939-50
unpublished observations [symbol]
indicates data missing or illegible when filed

TABLE 8

| Pallium | | Pallium and Subpallium | | Subpallium | |
|---|---|---|---|---|---|
| Motif | Importance | Motif | mportance | Motif | Importance |
| V$OTX2_Q3 | 0.0153 | V$MZF1_01 | 0.0306 | V$NEUROD_02 | 0.0064 |
| V$LMX1_01 | 0.0127 | V$CAP_01 | 0.0254 | V$HOXA7_03 | 0.0063 |
| V$AFP1_Q6 | 0.0064 | V$MZF1_02 | 0.0247 | V$DLX7_01 | 0.0063 |
| V$LIM1_01 | 0.0055 | V$LHX61_01 | 0.0124 | V$LBP1_Q6 | 0.0053 |
| V$S8_01 | 0.0051 | V$HMBOX1_01 | 0.0090 | V$NKX63_01 | 0.0053 |
| V$LHX5_01 | 0.0042 | V$MZF1_Q5 | 0.0081 | V$DLX3_01 | 0.0052 |
| V$HOXC4_01 | 0.0038 | V$PMX2A_01 | 0.0076 | V$Lhx3 | 0.0051 |
| V$PAX4_05 | 0.0037 | V$OCT_Q6 | 0.0071 | V$Pou5f1 | 0.0045 |
| V$OCT1_01 | 0.0034 | V$HNF4A | 0.0058 | V$HOXB7_01 | 0.0044 |
| V$PITX2_01 | 0.0031 | V$Lhx3 | 0.0051 | V$BARX2_01 | 0.0030 |
| V$ISL2_01 | 0.0029 | V$NKX63_01 | 0.0050 | V$OCT1_Q5_01 | 0.0025 |
| V$OTX3_01 | 0.0024 | V$OCT_C | 0.0049 | V$OCT_Q6 | −0.0025 |
| V$STAT5A_01 | 0.0024 | V$CREB_Q2_01 | 0.0048 | V$CAP_01 | −0.0022 |
| V$LMX1B_01 | 0.0023 | V$OCT1_Q5_01 | 0.0043 | V$AFP1_Q6 | 0.0022 |
| V$MZF1_Q5 | −0.0023 | V$PAX7_01 | 0.0041 | V$BARX1_01 | 0.0019 |
| V$HOXB4_01 | 0.0021 | V$LBP1_Q6 | −0.0037 | V$ESX1_01 | −0.0019 |
| V$NKX61_03 | 0.0021 | V$LH2_01 | 0.0037 | V$HMBOX1_01 | 0.0018 |
| V$DLX7_01 | −0.0021 | V$HOXB7_01 | −0.0035 | V$LIM1_01 | −0.0018 |
| V$LHX61_01 | −0.0020 | V$OCT1_08 | 0.0030 | V$HB24_01 | 0.0017 |
| V$OCT_Q6 | 0.0019 | V$NEUROD_02 | 0.0029 | V$Nobox | 0.0017 |
| V$PAX7_01 | 0.0018 | V$DLX2_01 | 0.0029 | V$LH2_01 | −0.0016 |
| V$OBOX5_01 | 0.0018 | V$PKNOX2_01 | 0.0028 | V$BRN4_01 | −0.0016 |
| V$OCT1_08 | 0.0017 | V$DLX3_01 | −0.0028 | V$IPF1_01 | 0.0016 |
| V$LHX8_01 | 0.0017 | V$OCT1_B | 0.0027 | V$RAX_01 | −0.0016 |
| V$1PF1_03 | 0.0017 | V$GCNF_01 | 0.0027 | V$OCT1_05 | 0.0015 |
| V$CHX10_01 | 0.0017 | V$OCT1_01 | −0.0027 | V$LMX1B_01 | −0.0015 |
| V$HOXA3_02 | −0.0017 | V$MTF1_01 | 0.0026 | V$PAX7_01 | −0.0015 |
| V$ALX4_02 | 0.0017 | V$S8_01 | −0.0026 | V$HOXC6_01 | 0.0014 |
| V$HOXA7_03 | −0.0015 | V$OCT2_01 | −0.0026 | V$LBX2_01 | −0.0013 |
| V$STAT5B_01 | 0.0015 | V$STAT1_01 | 0.0025 | V$IPF1_06 | −0.0013 |
| V$HOXC6_01 | −0.0015 | V$BARX1_01 | 0.0024 | V$DLX2_01 | 0.0012 |
| V$NKX63_01 | −0.0014 | V$DLX7_01 | −0.0023 | V$HOXD3_01 | −0.0012 |
| V$EMX2_01 | 0.0014 | V$OCTAMER_02 | 0.0023 | V$PAX4_05 | −0.0012 |
| V$HOXC8_01 | 0.0014 | V$BARX2_01 | 0.0022 | V$VAX1_01 | −0.0012 |
| V$Lhx3 | 0.0014 | V$IPF1_06 | −0.0021 | V$OCT2_01 | 0.0011 |
| V$MZF1_01 | −0.0013 | V$AREB6_01 | 0.0020 | V$AREB6_01 | 0.0011 |
| V$BARX1_01 | −0.0012 | V$ALX3_01 | −0.0020 | V$PIT1_01 | 0.0011 |
| V$LBX2_01 | 0.0011 | V$HOXD3_01 | 0.0019 | V$LHX61_01 | −0.0010 |
| V$PIT1_01 | −0.0011 | V$OTX2_Q3 | −0.0019 | V$HOXC8_01 | 0.0010 |
| V$VSX1_01 | 0.0011 | V$PAX4_05 | 0.0018 | V$S8_02 | −0.0010 |
| V$OCT1_Q5_01 | 0.0011 | V$CART1_02 | 0.0018 | V$CART1_02 | −0.0010 |
| V$ALX3_01 | 0.0011 | V$LMX1_01 | 0.0017 | V$STAT1_01 | 0.0009 |
| V$VAX1_01 | 0.0010 | V$PITX2_01 | −0.0017 | V$HNF4A | −0.0009 |
| V$IPF1_06 | −0.0010 | V$HOXC6_01 | −0.0017 | V$HOXC4_01 | −0.0009 |
| V$OCT1_05 | −0.0010 | V$ISL2_01 | −0.0016 | V$OCT1_B | −0.0009 |
| V$PSX1_01 | 0.0010 | V$SIX2_01 | 0.0016 | V$CHX10_01 | −0.0009 |
| V$HOXD3_01 | 0.0009 | V$LHX3_01 | −0.0016 | V$OTX2_Q3 | 0.0008 |
| V$OCT1_B | 0.0009 | V$OCT1_05 | 0.0014 | V$GSH2_01 | −0.0008 |
| V$RAX_01 | 0.0008 | V$PIT1_01 | 0.0014 | V$ARX_01 | −0.0008 |
| V$LHX4_01 | 0.0008 | V$VAX1_01 | −0.0014 | V$MSX2_01 | 0.0008 |
| V$DLX2_01 | 0.0008 | V$HOXA1_01 | −0.0014 | V$STAT5A_01 | 0.0008 |
| V$STAT1_01 | 0.0007 | V$NKX61_03 | 0.0013 | V$STAT5B_01 | −0.0008 |
| V$NEUROD_02 | −0.0007 | V$HOXC4_01 | 0.0012 | V$LMX1_01 | −0.0008 |
| V$LBP1_Q6 | −0.0007 | V$IPF1_01 | 0.0012 | V$OCT1_01 | 0.0007 |
| V$Nobox | −0.0007 | V$SHOX2_01 | 0.0012 | V$LHX4_01 | 0.0007 |
| V$CART1_02 | 0.0007 | V$LHX4_01 | −0.0011 | V$HOXB3_01 | 0.0007 |
| V$Pou5f1 | −0.0007 | V$ESX1_01 | 0.0011 | V$OCTAMER_02 | 0.0007 |
| V$HNF4A | 0.0007 | V$ARX_01 | 0.0010 | V$HOX13_02 | 0.0007 |
| V$OCT1_Q6 | −0.0006 | V$OBOX5_01 | −0.0010 | V$PMX2A_01 | −0.0007 |
| V$OCT_C | 0.0006 | V$HOXA2_01 | −0.0010 | V$HOXA1_01 | 0.0007 |
| V$S8_02 | −0.0006 | V$AFP1_Q6 | 0.0010 | V$CREB_Q2_01 | −0.0007 |
| V$IPF1_01 | −0.0006 | V$MSX2_01 | −0.0009 | V$VAX2_01 | −0.0006 |
| V$DLX3_01 | −0.0006 | V$OCT1_Q6 | 0.0009 | V$HOXA3_02 | 0.0006 |
| V$HOX13_02 | −0.0006 | V$STAT5A_01 | −0.0008 | V$OCT1_08 | −0.0005 |
| V$ESX1_01 | 0.0006 | V$HOXA3_02 | −0.0007 | V$GCNF_01 | −0.0005 |
| V$LHX3_01 | −0.0006 | V$EVX1_01 | 0.0007 | V$HOXA2_01 | 0.0005 |
| V$AREB6_01 | 0.0005 | V$GSH2_01 | 0.0007 | V$NKX61_03 | −0.0005 |
| V$OCT2_01 | −0.0005 | V$HOXD1_01 | 0.0007 | V$HOXB4_01 | −0.0005 |
| V$OCTAMER_02 | −0.0005 | V$LIM1_01 | −0.0006 | V$PKNOX2_01 | −0.0005 |
| V$ARX_01 | 0.0005 | V$BRN4_01 | −0.0006 | V$VSX1_01 | −0.0005 |
| V$GBX2_01 | −0.0005 | V$PSX1_01 | 0.0005 | V$MTF1_01 | −0.0005 |
| V$MSX2_01 | −0.0005 | V$CHX10_01 | −0.0005 | V$EMX2_01 | −0.0005 |
| V$HOXB7_01 | −0.0005 | V$RAX_01 | 0.0005 | V$DLX5_01 | −0.0003 |
| V$HOXB3_01 | −0.0004 | V$VSX1_01 | 0.0005 | V$ISL2_01 | 0.0003 |
| V$DLX5_01 | −0.0004 | V$HOXB4_01 | −0.0004 | V$MSX1_02 | −0.0003 |
| V$HOXA1_01 | −0.0004 | V$S8_02 | −0.0004 | V$PITX2_01 | −0.0003 |
| V$PAX4_02 | −0.0004 | V$IPF1_03 | 0.0004 | V$LHX8_01 | −0.0003 |
| V$LH2_01 | 0.0004 | V$HOXA7_03 | 0.0004 | V$S8_01 | 0.0003 |
| V$PMX2A_01 | 0.0003 | V$DLX5_01 | −0.0004 | V$SIX2_01 | −0.0003 |
| V$MTF1_01 | 0.0003 | V$LMX1B_01 | −0.0004 | V$MZF1_01 | 0.0003 |
| V$GSH2_01 | 0.0003 | V$FREAC2_01 | 0.0004 | V$GBX2_01 | −0.0003 |
| V$CAP_01 | 0.0003 | V$HB24_01 | −0.0004 | V$PSX1_01 | 0.0003 |
| V$MSX1_02 | −0.0002 | V$AHRARNT_01 | 0.0003 | V$MZF1_02 | 0.0002 |
| V$CART1_03 | −0.0002 | V$EMX2_01 | −0.0003 | V$OCT1_Q6 | 0.0002 |
| V$BARX2_01 | −0.0002 | V$Nobox | −0.0003 | V$OCT_C | 0.0002 |
| V$CREB_Q2_01 | 0.0002 | V$HOX13_02 | −0.0003 | V$HOXD1_01 | −0.0002 |
| V$HOXA2_01 | −0.0002 | V$ALX4_02 | 0.0003 | V$CART1_03 | 0.0002 |
| V$HOXD1_01 | 0.0001 | V$PAX4_02 | −0.0003 | V$ALX4_02 | −0.0002 |
| V$SIX2_01 | −0.0001 | V$CART1_03 | 0.0002 | V$FREAC2_01 | −0.0002 |
| V$BRN4_01 | 0.0001 | V$VAX2_01 | 0.0001 | V$AHRARNT_01 | −0.0001 |
| V$HMBOX1_01 | 0.0001 | V$HOXB3_01 | −0.0001 | V$IPF1_03 | 0.0001 |
| V$MZF1_02 | −0.0001 | V$LHX8_01 | 0.0001 | V$SHOX2_01 | 0.0001 |
| V$GCNF_01 | −0.0001 | V$HOXC8_01 | 0.0001 | V$OTX3_01 | −0.0001 |
| V$VAX2_01 | 0.0001 | V$GBX2_01 | −0.0001 | V$LHX5_01 | 0.0001 |
| V$PKNOX2_01 | −0.0001 | V$STAT5B_01 | 0.0001 | V$PAX4_02 | −0.0001 |
| V$FREAC2_01 | −0.0001 | V$MSX1_02 | −0.0001 | V$LHX3_01 | −0.0001 |
| V$EVX1_01 | 0.0001 | V$LHX5_01 | 0.0000 | V$MZF1_Q5 | 0.0000 |
| V$SHOX2_01 | 0.0000 | V$LBX2_01 | 0.0000 | V$ALX3_01 | 0.0000 |
| V$HB24_01 | 0.0000 | V$Pou5f1 | 0.0000 | V$OBOX5_01 | 0.0000 |
| V$AHRARNT_01 | 0.0000 | V$OTX3_01 | 0.0000 | V$EVX1_01 | 0.0000 |

TABLE 10
Microarray Data

| | | | | 5 | 6 | 7 |
|---|---|---|---|---|---|---|
| 1 | 2 | 3 | 4 | Comparison between groups | | |
| Areas or cells of | Expression levels | | | (fold changes) | | |
| interest | ES | ES | MGE | ES-GFP⁺ vs | MGE-GFP⁺ vs | MGE-GFP⁺ vs |
| Genes of interest | Lhx6-GFP⁺ | Lhx6-GFP⁺ | Lhx6-GFP⁺ | ES-GFP⁻ | ES-GFP⁻ | ES-GFP⁺ |
| Ventricular Zone | | | | | | |
| Hes5 | 11.62 | 13.39 | 11.72 | 0.29 | 0.31 | 1.07 |
| Oligodendrocytes | | | | | | |
| Olig2 | 8.80 | 11.63 | 9.59 | 0.14 | 0.24 | 1.73 |
| Pallial | | | | | | |
| Emx1 | 7.57 | 6.83 | 6.11 | 1.67 | 0.61 | 0.36 |
| Pax6 | 6.38 | 7.65 | 5.97 | 0.43 | 0.33 | 0.75 |
| Subpallial | | | | | | |
| Dlx1 | 14.14 | 12.14 | 14.36 | 4.00 | 4.67 | 1.17 |
| GAD1 | 13.89 | 11.59 | 13.28 | 4.92 | 3.22 | 0.65 |
| Zeb2 (Zfhx1b) | 7.92 | 8.30 | 9.50 | 0.77 | 2.31 | 3.00 |
| LGE/striatum | | | | | | |
| Ebf1 | 8.67 | 10.35 | 8.25 | 0.31 | 0.23 | 0.75 |
| MGE & CGE | | | | | | |
| progenitors | | | | | | |
| Nkx2-1 | 11.67 | 10.09 | 12.94 | 2.98 | 7.20 | 2.41 |
| NR2F1 (dorsal | 13.23 | 12.62 | 12.71 | 1.52 | 1.07 | 0.70 |
| MGE & CGE) | | | | | | |
| MGE subpallial | | | | | | |
| neurons & | | | | | | |
| globus pallidus | | | | | | |
| Lhx6 | 13.16 | 9.20 | 14.02 | 15.50 | 28.20 | 1.83 |
| Lhx8 | 11.49 | 7.55 | 13.13 | 15.31 | 47.56 | 3.11 |
| Sox6 | 11.86 | 9.69 | 13.21 | 3.92 | 10.00 | 2.55 |
| Globus pallidus | | | | | | |
| Etv1 (ER81) | 7.04 | 8.51 | 11.12 | 0.43 | 6.75 | 17.20 |
| MGE interneurons | | | | | | |
| ErbB4 | 10.16 | 8.39 | 10.13 | 3.46 | 3.33 | 1.01 |
| MafB | 11.63 | 9.68 | 11.78 | 3.86 | 4.28 | 1.11 |
| Maf (cMaf, vMaf) | 9.94 | 8.22 | 10.29 | 3.30 | 4.19 | 1.27 |
| Npas1 | 10.69 | 7.86 | 8.31 | 7.13 | 1.57 | 0.22 |
| Sst | 14.22 | 11.79 | 13.21 | 5.39 | 2.69 | 0.50 |
| Hypothalamus | | | | | | |
| Nkx2-2 | 9.24 | 10.61 | 6.68 | 0.44 | 0.07 | 0.19 |
| Otp | 6.92 | 7.16 | 6.84 | 0.85 | 0.80 | 0.95 |
| Rax | 9.10 | 7.21 | 7.05 | 3.70 | 0.89 | 0.24 |

TABLE 11

| | DlxI12b | | | 692 | | | 1056 | | | 1538 | | |
|---|---|---|---|---|---|---|---|---|---|---|---|---|
| | mCh | GFP | mCh/GFP | mCh | GFP | mCh/GFP | mCh | GFP | mCh/GFP | mCh | GFP | mCh/GFP |
| Day 9 | 0.0% | 0.5% | 0.1% | 0.0% | 0.6% | 0.0% | 0.2% | 1.1% | 0.0% | 0.0% | 0.7% | 0.0% |
| Day 11 | 0.1% | 0.8% | 0.3% | 0.0% | 9.5% | 0.1% | 3.0% | 2.2% | 0.0% | 0.0% | 2.4% | 0.0% |
| Day 13 | 1.2% | 1.4% | 0.6% | 0.0% | 7.7% | 0.0% | 3.2% | 3.6% | 0.0% | 0.0% | 3.3% | 0.0% |
| Day 16 | 1.6% | 3.1% | 0.5% | 0.0% | 6.9% | 0.2% | 2.0% | 2.6% | 0.0% | 0.0% | 5.6% | 0.0% |

What is claimed is:

1. An isolated polynucleotide comprising a sequence selected from one of SEQ ID NOS:1 to 145, preferably from the group of SEQ ID NOS: 83, 84, 99-104, 106-108, 110-118, 120-128, and 144-145.

2. The isolated polynucleotide of claim 1 further comprising an inducible promoter and reporter gene.

3. The isolated polynucleotide of claim 2 further comprising a stem cell-associated gene.

4. A vector comprising an isolated polynucleotide of claim 1, 2, or 3.

5. An expression cassette incorporating the vector of claim 4.

6. A cell incorporating or containing the expression cassette of claim 5.

7. A method for detecting cell differentiation comprising: (1) providing a vector having a promoter, reporter gene and an enhancer selected from SEQ ID NOS:1-145; (2) transfecting a stem cell with the vector; (3) directing differentiation of the stem cell to the desired cell type and expression; (4) detecting cells of the desired cell type by detecting reporter gene expression.

8. A method for detecting and isolating cells having a specific cell type comprising (1) providing a vector having a promoter, reporter gene and an enhancer selected from SEQ ID NOS:1-145; (2) transfecting a stem cell with the vector; (3) directing differentiation of the stem cell to the desired cell type and expression; (4) detecting cells of the desired cell type by detecting reporter gene expression and (5) isolating the cells of the desired cell type.

9. A method for generating stem cells comprising the steps of: (1) providing a vector comprising a promoter, a reporter gene, and an enhancer selected from SEQ ID NOS:1-145; (2) transfecting a stem cell with the vector; (3) directing differentiation of the stem cell to the desired cell type and expression; (5) inducing reporter gene expression; (6) detecting cells of the desired cell type by detecting reporter gene expression and (7) isolating the cells of the desired cell type.

10. A method for screening or assaying drugs for therapeutic effect on neural cells, comprising (1) providing a vector having a promoter, reporter gene and an enhancer selected from SEQ ID NOS:1-145; (2) transfecting a stem cell or programmable cell with the vector; (3) directing differentiation of the cell to the desired cell type and expression; (4) detecting cells of the desired cell type by detecting reporter gene expression; (5) isolating the cells of the desired cell type; (6) contacting said cells with a drug to screen or assay for desired therapeutic effect; and (7) detecting response of said cells to said drug to determine the therapeutic effect of said drug on said cell.

11. A method for driving expression in specific forebrain substructure regions, comprising (1) providing a vector having a promoter, reporter gene and an enhancer selected from SEQ ID NOS:1-145; (2) transfecting a stem cell with the vector; (3) directing differentiation of the stem cell to the desired cell type and expression; (4) detecting cells of the desired cell type by detecting reporter gene expression; (5) isolating the cells of the desired cell type; and (6) transplanting said cells into a subject to drive expression in specific forebrain substructure regions

12. A method for detecting induction and differentiation in induced pluripotent cells comprising: (1) providing a vector comprising a promoter, a reporter gene, stem cell-associated genes, and an enhancer selected from SEQ ID NOS:1-145; (2) transfecting a non-pluripotent cell with the vector; (3) inducing pluripotency in the non-pluripotent cell; (4) directing differentiation of the induced pluripotent cell to the desired cell type and expression; (5) inducing reporter gene expression; (6) detecting cells of the desired cell type by detecting reporter gene expression.

13. A method for generating induced pluripotent stem cells comprising the steps of: (1) providing a vector comprising a promoter, a reporter gene, stem cell-associated genes, and an enhancer selected from SEQ ID NOS:1-145; (2) transfecting a non-pluripotent cell with the vector; (3) inducing pluripotency in the non-pluripotent cell; (4) directing differentiation of the induced pluripotent cell to the desired cell type and expression; (5) inducing reporter gene expression; (6) detecting cells of the desired cell type by detecting reporter gene expression and (7) isolating the cells of the desired cell type.

14. A method for detecting and isolating cells having a specific cell type comprising (1) providing a vector having a promoter, reporter gene and an enhancer selected from SEQ ID NOS:1-145; (2) transfecting a stem cell with the vector; (3) directing differentiation of the stem cell to the desired cell type and expression; (4) detecting cells of the desired cell type by detecting reporter gene expression and (5) isolating the cells of the desired cell type.

15. A method for generating induced pluripotent stem cells comprising the steps of: (1) providing a vector comprising a promoter, a reporter gene, stem cell-associated genes, and an enhancer selected from SEQ ID NOS:1-145; (2) transfecting a non-pluripotent cell with the vector; (3) inducing pluripotency in the non-pluripotent cell; (4) directing differentiation of the induced pluripotent cell to the desired cell type and expression; (5) inducing reporter gene expression; (6) detecting cells of the desired cell type by detecting reporter gene expression and (7) isolating the cells of the desired cell type.

16. A method for screening or assaying drugs for therapeutic effect on neural cells, comprising (1) providing a vector having a promoter, reporter gene and an enhancer selected from SEQ ID NOS:1-145; (2) transfecting a non-pluripotent cell with the vector; (3) inducing pluripotency in the non-pluripotent cell; (4) directing differentiation of the cell to the desired cell type and expression; (5) inducing reporter gene expression; (6) detecting cells of the desired cell type by detecting reporter gene expression; (7) isolating the cells of the desired cell type; (8) contacting said cells with a drug to screen or assay for desired therapeutic effect; and (9) detecting response of said cells to said drug to determine the therapeutic effect of said drug on said cell.

17. A method for driving expression in specific forebrain substructure regions, comprising (1) providing a vector having a promoter, reporter gene and an enhancer selected from SEQ ID NOS:1-145; (2) transfecting a non-pluripotent cell with the vector; (3) inducing pluripotency in the non-pluripotent cell; (4) directing differentiation of the cell to the desired cell type and expression; (5) inducing reporter gene expression; (6) detecting cells of the desired cell type by detecting reporter gene expression; (7) isolating the cells of the desired cell type; and (8) transplanting said cells into a subject to drive expression in specific forebrain substructure regions.

18. A method for isolating neural cells comprising the steps of: (1) providing a vector comprising a promoter, a reporter gene, neural cell-associated genes for reprogramming, and an enhancer selected from SEQ ID NOS:1-145; (2) transfecting a non-pluripotent cell with the vector; (3) reprogramming said cell to a specific cell type; (4) inducing reporter gene expression; (5) detecting cells of the desired cell type by detecting reporter gene expression and (6) isolating the cells of the desired cell type.

19. A method for detecting reprogrammed neural cells comprising: (1) providing a vector comprising a promoter, a reporter gene, neural cell-associated genes for reprogramming, and an enhancer selected from SEQ ID NOS:1-145; (2) transfecting a non-pluripotent cell with the vector; (3) reprogramming said cell to a specific cell type; (4) inducing reporter gene expression; (5) detecting cells of the desired cell type by detecting reporter gene expression.

20. A method for screening drugs for therapeutic effect comprising: (a) providing a vector comprising a promoter, a reporter gene, neural cell-associated genes for reprogramming, and an enhancer selected from SEQ ID NOS:1-145; (2) transfecting a non-pluripotent cell with the vector; (3) reprogramming said cell to a specific cell type; (4) inducing reporter gene expression; (5) detecting cells of the desired cell type by detecting reporter gene expression; (6) isolating the cells of the desired cell type; (7) contacting said cells of the desired cell type with a drug to be screened for therapeutic effect; and (8) detecting any change in the cells of the desired cell type after contact with said drug.

21. A method for driving expression in specific forebrain substructure regions, comprising (1) providing a vector having a promoter, reporter gene, neural cell-associated genes for reprogramming and an enhancer selected from SEQ ID NOS:1-145; (2) transfecting a non-pluripotent cell with the vector; (3) reprogramming said cell to a specific cell type; (4) detecting cells of the desired cell type by detecting reporter gene expression; (5) isolating the cells of the desired cell type; and (6) transplanting said cells into a subject to drive expression in specific forebrain substructure regions.

22. A set of enhancers for labeling specific subregions of the mouse or human forebrain, comprising at least two enhancers selected from SEQ ID NOS:1-145, wherein at least one of the enhancers is selected from SEQ ID NOS: 83, 84, 99-104, 106-108, 110-118, 120-128, and 144-145.

23. The set of enhancers of claim 11 comprising SEQ ID NO: 42 (hs422), SEQ ID NO:78 (hs692), SEQ ID NO:120 (hs1056) and SEQ ID NO:144(hs1538).

The application's sequence listing, which the Patent Office published only in electronic form, follows.

SEQUENCE LISTING (159 sequences)

SEQ ID NO: 1 - protein, 1336 aa, Homo sapiens
AGCTAGCTAATTGCTTCTTCAGTTGAAGACCTAAATGAGTTTTAAAGTGAAATGCATATCTCTAAGGGCTAAGTAGCCAACACAATAGGCAATTGAGATAGGAAAGACTAATTTAGAAAAGGTTGTTTTGTTCGTTTTTCTTTTTCCTTCCCTCCCTTCCTGATTTCCCATCTTCTTCCTCCCTCTTCTCTCCCCTCTCCCCCTTCTCCTTTCCGTCCTTCCTCCTTCAGTTCCCTCTTTCCTCTTTTTCACCCTTTTATTTAACATTATAAATACGATGGGATTGTGTCTGCGCTTTTGTTGGTAATTAAATAAATTATTTATACATTTAACACAATCTTGAATTACCAGGTGATCATCTTAGGCACTCAAAAGCATAAGAGCCCTTGAAAGCAATATCTAAGCATAGATATTCCATAGCACGTCTTACAATCTAAATATTGCTTTTAGTGTAATCGAAGCAGCAAGAGTAGTCACAGCAGTTGATGGACTATTTTTCAAATTGATTTCAAAAATGTATTTAAGGGGATGATCTTCTAGTCTAGATTACCTATTGATTTTTAATATGAAAAGCTCATTATGTAAGCAGTAACCGCATATAAAAACCTAGCAAACCTTTGCATAAATCCTTTAATTGAATTTCCAGAGCCTGTGGTTCTACTTTTTTTTTAATTAAATCTATTTCTTTTTTTAAGTGTTACTGTGTAATTTGCATGCTGTGAAGAGGCCCTGTCCCAGATAAAGTGCCATTGATCCTTATTAAACCTCACCTCTGGGCTTGCTTAAAACTAACTGGAAAAATTAAAGTGTTCATGCCGCAATGCACTTATAGCTTGTGTGATAGGATTATGGAAAAAATAATAAAACTAATTTCCAGGGGAGAATTTCTAATGTGAGATTTTATTTTTTTTCAATTTGATAATTAATAGTGAAATCATATCATATATATAAATCATATTTTAGCCTATAAACTGAAATGGCAATTAGGAAAGATAATATATACTTGATGTAAAACCATGTTACGTGCGGATAATCTTTTAGCACTTTAATTTTTTAATTGTAGAAGGAGAGAATTATGAATTCAAGTCAAACACATTAAATGGTGGGTTTCATCCAAAAAATCTGATTCTTTTACTATGTACTGTATTAGTGGATTTATAATATTAGTGGGAGGAAGTATAAAAGATATGGAAAAAGATATTCTGGTTATGTTCGTGCTAAAATGTGTGTATTAGAATTACCAGGGGAAAGAAAAATATAAAAGCTGCAATAGGTTTTTCTATTTTTTAATACCTAACATTTGTTATTTTAAAAGCAATAAAATCCCCTAAAGAAA

SEQ ID NO: 2 - protein, 1259 aa, Homo sapiens
GAGAGAGGGCTCAGAGACAGTACTCGGCCTTGCATTTTTCTCCAGGCCTTGCAGGATGCAAGGTGGACAGTGCTGCAGTCCTGTGGATCTGGTGCCCTAGGCTCTGCAGACACATTGAGGGGACCCAGGGCTCTGAACAAATGGCCAGATGGTAAGAACACATCCCTCGAGTTGTTTCTTCCAGTTGCATTTTTCCCTAATCACTGTCTGCTTTGGGAAAGGTCGATCAACCTAGCAAAAGTACCCCCTGGACATCTTCACTAGGTCCACTGACTGCTCCCCAGAACTCTCAGTTTCCTGAGGATTGTGCCCTTTCCCTTCCTTTCCTGCTGCAGCTTCTCAGCCTAAGCGAACCTAGAGAGAGCAAGGGTGGGGAAGGAGAGCAGGGGTATGTGATTGCGCTGAGAACACCAAAAGCCCATAAAGTCTGAAAGGTTAAGCAAAGACTGAGGCATGAAGAGTGAAAATTCTCCATTCAACAATAATCCTCGCCCCCTGCCACCCCTGACATCTCTTCTTAAAATGGAAAGAAAGGGTGCATGATGACATTAGGCACTTTAAAATATGCAAAATTAGGAGCTGGTGCAGACCTCATTAACACCCGCCTCCAACATCATTAAGATGTTTCCAAGAAAATTAATTGAGAGACTCATTAAAAATAAATTAAGAAAAATGTGTTGCAGAGCGCCTGCACTCAGCTCATAAATCACAGCTCAGTGCTCTGGCCCGCTGCTCCGGCAATTAACTCCAACCTATTTGTTTTATCCTGACTGTGAAAATTAGAAAGCAGACGTGGAGATTAGATTAGGAATGTCTGTCAAGCGGAACTTGGAGTGAATATTTTAGGATACAAAATGGAAACCAGGAAAACAAAGACAGCAGAGATTTCATTCTGAGGAGCTTGTCTTTGAAAAGTGACAGGCAGATGAAGGGTGCTGGAGGGAGAGTATGGGGAAGGAGTACCTACTCTCGGGAAGGATGAAGGGGGAGAGAAAAGAACAGATGTTTAAACTCTTCTGACCAGGAATCGTGCAATACATTTGCATTATAAATATAAACAGTTACACATCTTAGTAAAGCTGGCATTGAGACATAAAATTGATGTTCCTGATGATACTTCATATGTCATACTTTAATGTTTAGACATAGAGTCATTTGGTTGAATCACTCGAAAGAGTTACTGGTCTCTTGCAATATTTTATGTATCAGTGATGACCACATGTTCCTCTATATGAGGTGAAATATGCCAGCCTCTTCCC

SEQ ID NO: 3 - protein, 1284 aa, Homo sapiens
CCCTTCCACCTTTATCCACAATATCCTCGAGTGGACATCACTGGGGTTCCTCTGAATGACTGAGTTGCCTCTTCATTATTCCGCCCAAGATGTCAGCTAAGGCTGTTTACAAATCCAAGGATTCTCTTGCCAAATATACAGTCTGTTCTCCAAGCTTTCATGTTATAACGAAATGAGTAACAAGCAAGACATCTTAATATCCTATTCTGCTAGAAAGTGAGATATTTCCCCTCCCTCGTTCTTAACAGATAAATTAATATCATCAAACATTCTGAAAAGATCTTTTATGAAAACATCTCACTTGCCAAAAAAGAAAAGTTGTATTATAAAACTGGAGAAATTTGTTTCAACTTGTTAAAAGCCCTATTCTCAGCCATGAATTCGGTTCCCGTTTTTTTTCCCCCTTCAATTAATTTCACACTAATCCATTTCTTTATCAGGCGTTGGAGTGAATGCATGTGGATCGAGTGATGAGGATGAGGGGGCAATGGAGGTGTTTGGCTCTGTAATTTCATCCTTGAATTTTGTGATTACTAACAGGACAACTTTTTTAATTTGCTCTTTTGTCTGGATTCCCTGGCTGACAATCTGCTCGGTGAGCTCGGCTTTTTAATCAATCACCTACATAATCAAATGTCACTGGCTATCTGCTCCGTGTAATTACTTTTGCAATTAAAAATCAACCTCAAGTTGCCTCATCTAATTAGAGGGATGGGCAGATTTTCATCTAGATTGATTTTTTAATAAATATTGACTTAAAATGCCATAATCTCATCATATTCTTTCATTTTCTTTGTACCAAAAATCAAACAAATGGAAGAATTAGCAAGCAGAAGGAATCGAGGGACTTCAAAAGCTTCTGCTGGTTCAGACACACAAAACTATGCTGTACAGAAGCCCAGCTTAGCTTGCCTAATAACAACACTCAATAGCTTCCACCTTTTATTGGAAAAAAGAACAAAGCAATTCAATGATTATATTTCACACCAACATTGTTGCAAGCCCACCATTCTAAGAGCTCCTAATTTCATTTATTGTACTGCCAAAGACAATCATTTCTATGAATGATATTATTTCCTTTAAAACAATCCCACACATGCTACTAGAATTTTTTAGCATTATGAGAAAACATATAATGCTTAATGCTGGAACCGCAACCACTGAGTTTTCTTAAACATATGAATGCCACTACAGCCAGATAACTTCCTTGTCTTTGCTGCCGTGTGTCTTTTATGTATTGTAATTAAAACATTGTCAATAACACAGTTCGTTGCTTTTTGGTTG

SEQ ID NO: 4 - protein, 858 aa, Homo sapiens
TTGAGGACAGAGACACTGGGAAAACACTCCTGGAGAAACTGCAGAGTAGGGGCACATCTCATAAAAATCTACCTTGTGTCCAGGATGAGACTGTATTTCCTCCACGCGCCTCAACCTAATTTCCTGTGGATTTCAGATCATCTTTTATTTCCAATTATGCTGCTGTTCACATTATCGATTTGGAGGATACAAATGTTGAATGACAAGAGAGGGAGAAGAAGGAGGGGGGAGGAGAATTCCATTTTGCCTGAAGGATAAGATACTCGAAATGCCACCCGCACAGCCTCTCTGAAGCGTTCATCAACGTGGCAGAGGCTGGCTCAATTATCTTTGTGTCAGATGATTATCTGAGAGCTTAATTTAATCTCCATTATCCTCCCCCGTCATATTTCAATTAAATCTGCTATCAGAGTGTTAACACATCTTTGAACCTGCTATTTCTTCAGTTAATTTTCCACTAAGAGGTGCTGGAGAGTAACAGATGTCATAATTATGCAATTATTAAGTGTATTTGACACTCGTTCTCTCAGGATTTTGTGGTTAGGGTAGGAGGGTTGGAAAATTAATCTGATGACAATATGCTTCCGTTGTGATCCGTAACACCACTGCAGGCTGGGGGACTGTCCTCCCGCTGTTTCCGAGGCTGCCGCCAAGGAAGATAAAGGATTAACTGATTGTGCGTCAGATTCGTTTCACTTTTGTATGTCTGGTAAATTGGATGAGTTCATTAGGCTGAGCAGAACACCAGAGGCATTTTTTTAAAAAATAAAAAAAAACCTTCTTCAAGACCTCAAGAAGTACAACAAGTACATCTCAGGGAATATGGTAAAGTTATCAACTATAGAGTTAAGGGCAGTT

SEQ ID NO: 5 - protein, 1470 aa, Homo sapiens
ATATAGACATGTGATGGCATCTGTAATTCCAACCAGTCCTCAGGAGAATATCCACAGATGCCTTTTTGGAGCCTTCTCTAAGATAATGAAATAGGCTCTGGTCAGAGACACTGTACCTCACACTGTATAACAGCTTTCGACATAAATCTGGAGCATGATTTGCATTTGAAAGCACCAGATCAATATTTGAGGAGGGATTATTTTTTATCAACTTGGCTCTAATTCTCTGAAATATACAGTTATTTTTTAAATGTCAAGACCAACTACACCCACACTGGCATGAAATAGCTTTGTCAAAAAAGTTGAAAAAAATTAAACGTAAATTTTGTGTTGACATAATCCAGGTTAAGTCTAAAAAAGAAAAATACTTACTTTTGTAAAATGAGAGGCTATTTTATCACTCAGAGAATGTCACATCAATTGTAAAGCCATCAGGCCCAAGGTTTGGTGGTGATTGCTTCATATTTACTGTTAGTCCAGCAACGGGGATGGTACTTTTACAGTCTTTGGACAGACTAGTGAGTGTGACATTTAAAGTGTTGATTTTTGCAGCACTTATGTTAATTGTTGTAATTTTCCTGATGAACCACCATTCTGGTTTCCTGATGCAGCCAAGATAGTTTTACATTTTCTATGCAGGGCCTCTTTGCCATTTGGTCTGTGTAGTGTCAGCTTCGAGTGCTACTGAAAGCAGACAAAATTGCAAGCAAATTGCATCAGATTGCCAACATTGTGAAAAGGTAAATTGCTTGCAAATCTATTTAAACCACTGCCCTATTTTCATCAGCTTCAGTACTTGGTATTCATGATTGCTTAATTGGCGACCTTTCCTATTGTGTAGTGCTTTATGGTGTAATGGAAAGCGATCTTTACCAAACCAATTACCCTTTTTTTCTCAGCACTACATTATTGCTGTGATTGCAACTGCCAGTCCTTTGTAAATGAACTTTCTGATTTCAATGATGTTTTTAAAATGTAAGATAGAAAAAAGTGGCATTCATATTGTGCGATGTTCTATTTTGAAGCCTCTTTGTAGTCACCATTGTCTGGGAAAATGGACTGAAGGGTTACACAGTACCTACAAATATCCATGTAACTATTATTAATATTATTATAATGTCCTCCTTTGTACTGCAGCTCAATTAGGAAAGGATAGGAGAAATATTTTGTCACCCTGTCAAGTGCACAGGAAGTGCATTTGAGGCTTCTTTTTTGACACATACATTATCTCTAGTAATAAGATTCGTTTTAAGGAGTGGTGATGAAGATACAAAATCAATTTAAATAAAATTCACATTGCTAGTTTTATGGTCACTCAACATTTAAAGGGGAGCTTTAAATGACTCAAATATTCAGACTTAGAATAAAAGCTTAATTTTAAAAGAGATAGTTGTGAGCATACTAAGAAATAGTGAATTTTTAAGATCTTAGGTTCTGAATATACATGCCAAGACACAGCAAAACATGACT

SEQ ID NO: 6 - protein, 1910 aa, Homo sapiens
GTGATTCCTTCAAGATAAAAACAAAACTCTGCCAGGCATCACTAACTAAGGACACCTCCTGTCACCTAACAAAATTAGCTGATTAGGAGCTCACAGTACACGTGTTCACCCCCTTTTCCCACTTAACATTGATTTTCCCTTAAAACCCATTTTAATACCCACTACTCCTCTCTTGTCCCAAGACCTAGAAGATGCGGAGTATAAGAGAACAGACAATACTTACAACACAGTCCCCAGGCTCTGGCTAGCTACTTTGCGCCAACTTCTCTTGGTGAGCTCTCTCTAGCTGCGCAGACCCTCTAGGAACATTCTCGGTATCTCTCTGCCTCCCTCTCCCTCTCCCTCTCCCAGGCAATGCTGCTCCCATTAGAGGAATTAAAAGTGGTTGGAGCCATGCTAAATTTAACAAGCTCATTAGTATTCTTTCTGAGTGCTTCCGAGTGAACTCTCCCTATTCAAGCCTCTCTCTCCAGCAGAAGGGTCAGGCGGCTAATCATTAAATCAAACTAATGTCACCCTATCACAATCAGCCTGAGAGAAGGAGGGTTTATTATTTCAGTTTATGCTAAATAAACGGTTTTACAAATGGTCCCCAAGCAAGGTCAACAGCAGCTTCAATTACAAGACAAACTTAACAAGAGTTGCTATAAACCAAGTACTCTGTATTGACTTAAGAACAGGCTCCACTCCACATATTGCCACTAGCAGGATTGTACAGGAATGCATATTGTAAAATAAAGGAAGGGGTGAGCTTTTTTCTTTGCCAGAATTTGCGAGTGCACAGCGACTCCTCATTCACCTCTCTCCAACCAGCTAGCCGCTCAGCTCAATTCACCCCACACAAAGGCTGGAGCCTAGACCTCAATGGACCGAGTGAAACATGTTCAAAACTAGGCTCTCTATTGTGACTGAATTTCTTAACATCTTTTCAAAAAGCGGAGAATGCCTTGAGGCTAAAGGAAGAAACAGGCTAATGGTGAATTGGGAATTCTGAGCAAATTTCAGAGCCCTTTCCTCCTAGCTTTTGAGGTTGAAAGCAAGCTCTTTCCTTTCAAGTTTCAAAGTCCTTTTTCCTCCCGCAGTGTCACAGAAGGATTTGAAAAGAAGGTAATTGTGCTCGCAGTCTCCCTGATCAGAGCTTACGTCCTATTTCTGGTATTTCGGAATACTTCTTGCAATAATAGTGCATATAGCTCAATCCCTTAACCGGCCTGCACTCTGCAATTGCTCATTAAATGAACAATTGCGGGTATAAAATGCCTTTTATGTTCAAGGTCTGGATATAAGATAAGCATTCTAGGACTCTAAATTTGGTTTACTAAGGAAACTCTCCATCATTAAATTACAAAACTGAAGTCAGAATATCAGGCTTTCCCAGAAAAGTGGCACTCAGGTTGCAGCCAGCCAAAATGAAGGGAGGATGGGGCGGGCAGGGAGGAGGCAACAAAATGTTAAGGGGGGGTGGGGGGAAAGACCGGAGGATACTCAGATTTCTAGCCAAATGAGATTCTAACAAGAAAATACTATTTCCATATTTAAGGTCTGAGTTTGTGAAACCTTGTAACTTCTATATTGAATGATATAATAAAGTCACGTTCAAATGAATTAAAATACAGGACTGAGGCTCCATAAATATGTTGTTGACTAATCTGGACCCCTCACAAGCAAACATCTTCCCCATCCTTAAGAAAAGAAATAACCCTTTCCCATCATTATTTACATCATCTCATGTGATCCTCACAGCAACCCAATGATGGCGGTAGGACAAGGTATTAGGCCCAGCTCAGAAACTAGCCGTCATGTCCCAGGTGAGTAAGTGATGCAAAGAAACTTCCCAGTATGCTTTACTGAATCCACACCTCCCTGTCCCCTGTTAACAGGACAAGAGCTCTGTTCCTGGGTAGGCTTTT

SEQ ID NO: 7 - protein, 1853 aa, Homo sapiens
AGAAGCTGACCAGGTGAGAGCTGAGTAGTTCACGCACAGGAAGAGGGGACAAGTTTTTCTGTTTTCACAGGGGTTCCTCACGCTCAGGCTTCCAGCGTCTGCCTGCACTGACATCATCGTGGTCGCGATGAAAACAGTGAAATAGGAACCCTGACCTCCCCTTCCATGAGAATCCAGCAGAGAATTTGCTGATGTGTTATACATCCGGGACAATCGGAAACTGCCGTTTTGATTGAGTATTAGTTGGGATGAGGAGCACATACCAGGACTCCCAGATCTGGAGTCCTCACTTTCTCAGCAAGGGCACCTGCATCCTGAGCTTTTACATGTACACACACCCAGCGATTGTGTGTGCCGAGAAAGACCCACATACGCACATTGTTTTTTCCTCTTCCACGATTATCTGCCAGAATTCTACTCAGTTAATTGCGGTTTGAGAACACACCATCCACAGGAGAGCACCAATGGATCTAGTCTAGTGAGGTTACATTTACTTGTAATCCTCCCCCTTCCCTTTCCCATTTCTTTGATGATTTTTCCCATAAGTGTGTAAGCTACTGGGACTTAGTAGAAGCAGGCCGCTCCTCCTAAATGTGATTTGGACCATATGCTTTCTACATTCATTCCCGCTTCGGCTTTTCTTCTCTGCACTAACTGCTAACACGTTATAGTCACCTTGAAATTTCCTCTGCTATTTTCCAATTAAAAGCTTAATAGCCCTGGAAACGGAGTTCATGTGGTGAAGTTTACCACAGCCCCTTGTTCTGAAAGGCTTTCTGCTGGGATCCCATTATGTGCTTGAATAAACCCTTTCTGCAAACAGAAATGGGACTCGGGGTTGTCAGGTGTTGGGTTACAATAGACTTTGAGGCAGGGGACATTTTACCAACATAAATACAAACCTGTCCCTATAGGGAGATGTTGTCAAATACTGGGATATGGAAAACATTCCCATCAAATATGAGAAAAGGATTACTGCACTATATCAAATGAGTATTTAGATCTCAGCCCCCGATGTGCACCGGAGTGAAACGGGCCCCCGGGACCAAATGCCAGACTGTTTGAGTGGCAACGAGATAGGGTGGCTAGGTGACCGACGGGGGAAAAGGGGTCGCCTTGGTAGTGAAAGTGCCCCCACAAACCTGGTGCAGAGCTCTTCTGCTTTCCTTTTAAAAATTTATTCATACTCAAGTTCTTTATACTTCCTCGTTTCACTGTTTGAAGAAAATCGGAAGAAATTTGGTTTTGAAAAAAGTCGTTGGTCCCCACGTTTCCAAGAGATCCGGAGGTTTCAGCGCAATAGTTTTCAGTTAAGGTGTCATTTGAGGCCCTCTATATCGCAGCACGTTAAATGACTCGCGTCCAGCTCCCCATTTCCTAGCCTCGGGCCTACAGGGCTGGGGGCGACCTCTGCCTCCCGTCCCCAGAGCTTACAAAATTCCTTCCAGTTGTATTTTAGGGCTTGTTTTCCTAGAGAAGGTTGAGACTAGAGGAAGGATTAAAGTGGTGGGGGAAGGGGCAAGACCGAGGGGTCCCTACCCCACGCGGCTTTGGAGGATGGCCTCCCAGGGTTAGCACTCGAATGCTAGAGCTTCTTGTCCACACTCTACCAGGTCAGTGTCCCGCGATCCCCACCTCCCGGACGCGTATGAAACGGGAACAGCTAAGGGCTTCAAGGGAAACACACAACTGGGGTTCGGTTTTCAACCCTCCTCTCCGCAAATCAGCCTTCTGGGCAGAGGGTTGGCTGCTAGAACGCCTGGAGGTGCTTCCCTTGAATTCATGGCAAACACCAGAGGAAAGTTTTCAGGTTGCTTGCTTACTTCCAGGGCAGTACAGAGAAAAGCGGCCTC

SEQ ID NO: 8 - protein, 2890 aa, Homo sapiens
TGGACTTTGGGAGGAAAACAGGCATAGGGCACAGAAGTGGGGGGCTGTTCTGGACAGGAAGATGAACAAATGCCTTCCTCTTCTCTTCACTGCCCCCCCCCCCACCAACCCCCACCTCAGCAGAGGGAAGGGATGCATCTGCTATCCCCACTCATCACTGGACTCCCCAAGGGCCAGGTGTGCAGTTCGTTCACCTCAGGGAGATCCAGTGCCTGGAACTCAGTGCATACCCAAGTGATGTTTGTTGAATGAATGAATCTTAGTTAGAGCCCACGTCTACAAACGAAAAAAGAGCAAAAAGCTTGTTTCCATTTCCAGTTCTTGTTTCTGAAGAAAATGAAGGGCTTTTCTTTCTCCCCAGAGACCACATCTTCTTGGCCCCTCTACCTAGACCAATGCAGAGATGTTCCAGGGATGTTCAGTCTAGCCCCCTTTCAGTTCCTTACTCTTTCCCACCTATTCCTCTCCCTTCTTAGATCCTTCTTGTGTTTATGCACAGTATTTGTTTGGCAAGTGCCTTGGGAACTAGCAAAACCATGAGGACATTTTCCTGTCACCGATACCCTCTAATGTGTCCCTTTTGAGTTGGCAGCTTAAACTGCTTGCTGAATAAAACATTAACTTCTTCACCCCAACCTTGTCCTTACTCAATTCTGGCTTCACAGCTTTATTGACAGCAATGCTTATCAACCCACTTTTATGGTGGGCTGAAAGAGATTGACTATTATTGTGCCCAGATTAAATGGGGGAGTAATGCCACCCCTGTCTGATTGTGTTGTAATTGGTCAGAGTTATATACAGGTGCAATTTGTAATATTTTCAGTAAATTAAATTTTTTTCTCTTTGGCTTTTATTGATGTATGTTCAGATGCCCATTAGGGCTTCCTTTTTTCCAGTGGAAATTGCAGCATGTTAATTTTCACACAAATTACAGCAATAGCAGGTATCTCTATTTGATACATTATAACAGGAGCAATCAAGGATAATTGAGTGCCTTTCAGATGGAAACGGGTGCATTCACTTCAATTCAAAGCGAGTCCATTTATCGCCTAATCGGTCTTTAAACACTAAATTTCTGGAACAAAAATTCTTGTCATAATTTTGCTTAAGTGTATTTGGAAATCACAGTCCTTTGAGCAAGGATAATTGAAATCAAATCCCTTTCAATGGAGGTGACATTTCTACATTTTCCCAATTGAAATTAATTTCAAAAATTGAGCATGAATATCTTCAAATGGCAGGCAATTATAGCTTTCAATGGGAAGAAATTATGCGCACAAAAAAGTGGAGACATCAAATACCGCTTCAGCTAAATGTCTTTGTTTCCAACTGTGTTTGCCTTGTAAAGATTTACATATATTGACTTATTATGCAACCTTGAGATGCAGATCGCCTTCCTTTTTCATCTGAGCCCATTAAAATTAACTAAAATTGGAACGTTCTTGTTAAGCTTCATCAAAACTGTTTGGAATTTACTGCAGCTGCAGAAATGTGTTCATAATAGAACTTAACCCTTCAAAGACTTGAATTCTACCCCCATTTTTTTTAAATCTGGAATTCTAACTTCAGCGCATTTCATTGTTTCACTTTTAATGATTCAAAAGAGGAGTGGTGAAGAACTGATATGCTAATTGTCTTCTCTTTTTGTCATCTGGTACCCATGGGATCTCAGGTAAATCTCTGGAGCCTGTCCCCTTTGAAAACTGCCCTGAAGGACAATACTGAGTTCCCAGAGGGCACCAATATGCCAACCTTTAATATTTAAATGTAATCATATCAAGCCGATTTCCCACTCCTCACAATAGGAATTGCTCTTATTGTTGGACTGTGACAAACTCTGTGGGTTTCCTGCTGCGGACCTTTTCCTACTAAGAACCTTTTCTCCCAATTGTTTTATTGCCACATTAATGCTGCTATTAAGATCCGTGTGCTATAAATTAGATAAGCTTTATATATTTTTTTATTCATCGTGACTTTCTTCTGTTTTCCAAGGGTAAAAGTATATTGAGAACTGACTCTTGCAAGCACTTACTTTTCGAAAGTAGTTTAGAAGCAATCTAGCCATGTTTTACAGTTATAGCGGCAATTGTTTCAACAACCCCAAAAAAATTGCATTACTGAAATATATTTCATGGGTGCAATTGGCCAGGGACAGGGAGGGCAGCAGGCCATTTCTTTTATTAAGGTCTTGCGCAAATGTTATGAAGAGGGCAGTATCTCAAGAAACAATTTCACAGCTGGTTTGCTCCTAAGCCACTCAAGCCTAAAAATGCACCGAATTCCTGGTGGAAAAAAAAGAAATAGATGTCACTCCCAAACAAAGACAGGTGCTAAGCTGCGGGAGATGAGAGAAGGGGTGAAAACAGTATCCAGCTTTAATAGCAAAAGCAAATGCTAGCTAATGGCCCATTCTCAGGAACTCGTTAAGTCATCTCTAAGCAACCACAGGATAATACACTCGTTATTTCTGCTGGTATGTTTCCTAAAAGTGAGGCGTATTGCTTTGAGCCCAGAATCTTAGTGGATAGTGCGCCTCACCTCTGTATTAACCTGTTGGCACGAGACCTTTCCTGCCGTCTTATGCCTTCTTAATGGAATTTTTATTAGTCATTTGGGTGTTCTTTTTTACTTTATTTTCTTTGCTCTTAATTTTTAGCTTTTTAACTAAAAATGTTTTTAAGTTACCTAATGTTTTTTGTGTCCTATAAGAGAATTTCCCCCCTTGGTTCACCTGCTGATTGGTTTTTGTGTATGATAAATTATTCAGAGCTTATGCAAAGTGTTTAATGTATTTTCCAAGTTATTGTTTTAGTGGAAGATGGACATTTGTCTTTGGGTAGGAATATGTGGGTTTTTTACGTTCAAAGCAGGAGTTGTTTTCTGCTCAAAT

SEQ ID NO: 9 - protein, 1702 aa, Homo sapiens
TGGGTGATGAACATGTTTTCTGCTGGGGTAGTAACTCAGAACTCTAGGCCTTTGGTACAGTTGATCCTTAATAAGACTTAGTTTCAGGTTGGAAACTGTTTGTTGAAGGTCAACATTTTGTTGCTGCTTTTTCTGCTCAAATGTAGTATAGAATCATGTGGAGGATAAAATTTTGCTAGTTGTTCAGCGTATCCAGAACAGAGTTCTGGCAGTTAAGGCGTACAATACTCTTGTATACCTCAATGATGGCGCTTTTTAAACATTAGGGTAGTTTTAAAAAATTGCAATAAAGTCATTGTAATTCATAGACCATGCTGTAATACAGAGATACGTGTAAAATACAATCTGTGTACCTGATTGCAGGTAACAGAGTTAAATGTACCAGCAATTTCAAACACAGTTTGATATTTCCTATAATAAAATATAATGTAAAAAATTAAATATCCAATATCAATGGATTCTAAATGGTTTTGATATTTCTTTTTGTCCTTTCCCATGAAGAGTAATTTATTTCCCTTTTTAAAGTGTGGGCAGAATGATTACTAGCGCACTGTAATGTAATTGTGTTGCATTGATAAAATAAAAATTGTCCTTTATCTGTGTCCTGATAATGTTCAATTTACAGGCTGGCTTCTCTGCCACCTCTTCAGTGCTTTGAGTATTCCAGTTCTCCTCCCTTCCTGCTCTGAGAGCGCACAGAACTGTTTGAAATCCACTGGTACAATTGTCAAATCAATTATTCATTCTCTGCAATTATGCTCGCACAAAGAACATTTTGCTGGTCTGAATGATGATTAAATTAACAGCTATTCCAGCTGCCTGATAACATCTAATAGAATATTCATAAGCCCAAAATGGAATGAATTATCTCCATTAACTTCATCATGCTCACTTAATTACATGCTTGTTATTGTATTTACACCTTGTTAGATACCGCTGAAGCTGATCCAGTGGCTGGCCGGGAATTGGAAGCGTCTGTCATGGGGCAGTTGGAGCGCGTTTTGTAGGAAATGCTATTTATTTTAAATGCTCCACCTGCTGGGAGCCGAGGTTAGTCAGCAGCACTGAGATGAATTGGGAAACGGGGTGTAAAAAGAAATAATGTGCTTCTGACAGGCTCCGTGGCTTTTAAGTTGCTCTCATTCAGCCACTTCACAAAAAATTATTTTATTCCATCTCTCAGTGATGATGACATGATTGCTTTTTGGTAATCATTTACCATTCTGATTTTATTTTTTGAAGTAAATTGTCTGAAGTAATAGGTTCTTGGAATTACAGCGTGCCTTGCTTTTTTCTTAGAACTTTATTTAAGCTTGTCTTCCAGCATTTAACCCGAGTCCCCTCTTTCGTTTGATCTTCTAACTTTATTTATACAACAGTGCTTAATGATCCTGCACAATGTGTTTCTTTTTTTTTTTTCCTTCTCTACAACCTCCCCCCCCACACCCACCCAAAAAAAAATTCTGTCCAGTATGGTTGACAGTACTTTTTATAACCTCAGCAAGGGGGCTGCATGGGCAATTTTCTTCCGACATGACAAATGCAAACACCCAAAACCCAACCCTGAGAGAATCACTTCATCCAGTTGAAAGGAAATTTTTTATCTCTTTCAAGGTGACTCTTTTGCCACTGAAACATGGTAAGGGGCACGACTCTTACCTTCTATTCTTGTCTATAGAAGTGGCATTCTTTACATTGCTTT

SEQ ID NO: 10 - protein, 1689 aa, Homo sapiens
GGAGTTAATCTTGTGACTGTTGCCCAGGATGTGGGGGTTAATCAAAGTTCCAAGACTGGAATTTGGGAGAAGTTGAAAGGGAATGAATTCACTGCCCCTCACCATCACCCCTTTCTCCAGCCCTTACTACCTCTTACCTCCAACACACACACCATGCTCCTCAATATACTTCTTCAAACATCATTTAAAATTAGTTTGGCGGAAGATGCAACAGTAAGGAAACTCCAAAAACAGATTTTCCTGTTTGTTTTAGGGTTTTAAGAAAAACACCAAGCCCCAGACCCTCTTGTCAGGATGCCCGACCCTTTAATTCGATGCTCCCATCCCAAATTTAAAGCTGCCATTCCCTGCTCCTCACTGTCTCTCTCCCGCCCCCTCTTTCTTCTCTCTCTCTGTCTCTCTCTCTCTTTCTCACCCCCTCTCACCTAAATATTTCTTAATTGAACAGTTTGTGGTGGAGCTTCCTTATAGCAGTTTAATAGATTAACTCATCTCAGCCAGCCTCAAATTTCAGATTAAAATTCCTTCATCCCGAAGGCAGCATTATCAGGTTGTTGGAGGCTGTTTTCAAACCTTGGTTTTGAATAGCAGCGGCTCTGCATTAATTTAACCACTAAGCTAATAAGTAGGTTTCGTTTTGTTATGCTAAGCTTTATTGCTTTTCTTTTGATCAGAATGGTGTTGTTGAGCAAAGCAGCAGACAAGGCATTCTTTGATGAGGGAATTAGCGCTCCATTCTTCCTCTATTATTCATAGCGCAGTGGAATATGTAAGTACCTGAGGGTGTCAAAGGAGCGCAGGTTCTATTGCAAAGTGCTCGCCTTGTTTCTCTCAATAGCTGACTATGAGATGATAAACCGCTTAATACACTGTGCTAATTGGATGAGAGCAAAAAGAGATGGGAATTAAGGCGAGGCAAAAGGAGAAAGTGCAACCAGCCTTCAATTCACTCTTTCACCACTTTAACAGCACCAAAGGAGGCACAAGCTTTCTATAAGCAGACTAGAGGTTTTGTGCAGAGATAAAATGAACGTGTTAGTGGATTCAAGTAATACACTAATTATTGCACAGTATAAATACCACTACTGGTTTTATAACAGGGAGGTAAACTTCTTTTGAGAGGGTTATAGGATTGCTTGGCAGTGGTGTAGAACCTAATAAGGGCCCAGAGTAATAACCCCCTGGATTAACAAAATTGCTGCTTGTAGAAGTATGATTCAGGCTTTTACGAAGATTTCCGGAGAATGAATAAAAATGACTGAATGACATTTCTTAATGTATAACCGGTAATCACTCCCATATCTTTAAAGGAAAAAAATGTATACTTCAAACTGGACCCTTAATAATGTCCAGGGAGGGATAACAAGACTTCTTCCTTTGAAAAATGCTTCCCCCCACCCCACGCCCCCGCCCGCTCTCCCCACCGTCAGGTAGTGGGTTTTCTTCTTCCTGTCCCCCAGCCAGGCTGTCACTCTCAGTGAAATATGCAGTTGTTCTGGGGACTTCTGTGTTCCAAAATATTATTTTAGGCCCCATTTAAGACCCCCTTCATTCAGACACACTCACTTTTGGGTATACACATAAACACATGCTCATGGACTTTTTTTTCTCCTAAAGCAAGTTGGGCTAACCTATTATAATTTGTTTTTCTCTCACATCAGCCCCTTTTGTCACTCTAGTAAGATCACA

SEQ ID NO: 11 - protein, 2110 aa, Homo sapiens
GGAAACATTAAACAATTCAAGATAGTCAATATCTTATTGTATCAAAAGGATTGGCCTAGCAAAGAAGTATTATAGGGGTGAAGTGAATGTGGGCTATAGTAATCTAGGACTGAGTTTGACTAGGGGAGTGGAATAAGAGCAAAAGGGAGGCTTGCTTGACTGGAGGAAAAGCATCAGGAAATATGTTGAGTTGTGGCTAAGCATGTGATCTGGGGACAAATAAGAAATCTTCCTAATGTAAATCATTGGAATTATCTCATAGATAAGTTTTTCAATGCTTTTAGCATTGCCTTGAATACTTTCTGGACTAAGATGGCATGCAAATAACCAAACAAAGCCTACAATGGGAATCTGAAGACATTTTAAGAATTGTGTGAATGTGCAGAAAACCAGGATGTTGCTACTTGATTGACAGTTGACTATGTACATATAAAAACACAGAGTTATGGACTTAATGCAGGTTAAGCAAGGTGTATTTGATGGCATGTATACATCATACAAATATGATCTTACCTTGTTTTTAATTCCATCTTGGTGAATACAAGCATATTAAATATTCCACTTGCAATCGTTTTTCTCAGCAGTTCATCCATTGACATGCACACACACGCATGTGAGCAGATGTTTTCTAGTACCTTTGGCAGAAGAATTTAGTGCCTTGTACACATCACACCTGCCATGTCATGCTTATTGATTGAGCAATTCAGCTCGCTGAAAGGTACTGGGTTAGATATTAATTTTAAAATGAAAGCCTTCACATCTGCTAATGCCTGCCAGTCTCTGGAGTGAATGTGCCATTGAAGCCAACGGAAGTGGGCAGAAGCAGCCTTCATGGGTAGGACTGACAAGTTATTTTGAGTCTACTGAATTACCTTTATTGTTGCCCCATACTTATAGGCAGACCTCTCCTTCCGTTAAACTCCTTCACTCACAGTACTTCTGAAAATAGCTCTGGTGGTTTGGAACTGGTCTTCCTGGATTTTCACGCAAATGGAATATTTGTGGTAGTTGAGTGATAAATGGTGAGATAATGGTGTTTTACAGGCAGTGAAATGACAAGGTCAGTTTTAATTAAGCTGAGATCAACCTCAGTCTGTATTGCACACTTCTGATTAGGTTATTTCAAATTAACATAAGTTTTTGGAGACTTCGCTGAAGTCAGTGGTGTTAAACACCAGCTGTGCTGGCAGAGAAGCGTGGGATATGAGAAGGAGATAGCATTCACATTGAAATTAGCACTTGGCACAATATAATTCTCTGATTGCAAACTATGTGGAGTTGCCTGTGCTAATTGGTTGATTTTATTTGAAGCAGATGTTGTTAGCTTTCCCAATAATGATCTGGAGAGAAATTCTTTTGAAAGACATGCCATGTTAGGATCTCTGCAGTATAATAAGCTAATTACAACTTTAAGTACTTGCAGTAATTAGCACAATGTGTATAAAGTGTTCCTGATCTTTTCACCCTGCCGCATTATTGTCAGGGCAGCTTGAAAAACAAAAAGGAATGCTAGATGGATTGAGTCTCCCTGGTCTAGCCTCTTCGTTTCCCAGACTTCTGCACTAAAGAGATAATGAACTCGACTTAAATCCTTCTCTTTCAAGCATGCCAAAAAAGGTTTAGGAACCAACCCCCACCATACAACGCCCAAAAAATGGAGAGTGAAATTTGCCAAACTAAATGTTGCTTCAAACACATATGCCTTTAAGAGGCAGTGAAGTCTTCAAACATTAGCAAACCGAGACCGTTAACATATTTATTTCATGTTCACTTATTTTATTGTTTACCAATTTGGTCCATGGATCAAACCCGTATTTTATTTGGGAACATTATACCATCACACCTCCAAGTTAAACCTCTAACTTTCCTGTATAGATACCTTCAAATGTTTCTGTAAGCCTAAAATCCAGTCTCTCCATACTTTTAAACACCAAGTTGTTACAGACACATATTTTGCTTATGTTAATAATGAGAGTGAAGACATAGGAGTAGATGTGGCTCCCCACATCTTCGTATGTGAGAAAAATGGAGAAAAAAATGAATGGGGAAGAAAATAATTGATAGAGACAAATTCTTAATAACATAGTAAGCAAAGTCCACAAATGGTAAG

SEQ ID NO: 12 - protein, 1661 aa, Homo sapiens
AACTGTTCCGAGCCAATTTCAGCATGGACTTTAGTTTAAGTCTGAGTTTCAAGTCCCAAGGAGGCCCAAAGTTTCTCAACAGTCACTCTCCCTAATTATTCCACTTACCTCCCCACACACCTAAGATGCCCGCCCTGACTACTGTCCACAGTTCGGGCCATGGGTAGTTGGTGATGGAAGGACACCTCTGATAATATTATGCCAAATGCGCCCTTTTTGCCTTCCAGGACCTCCTCCAGATCTGGCTAACCTGTCTGAAAATGTAGCAAATTAACTTACTCCTTTCCCTCAACCCTCCCACAGAGGCCTGTCCCAGGCTTCAATTACCCCTCACCCCAAGATGCTGTGGGGGTGGCCCTGGGAAAGCAGGTGTTGGGCCATTCTGCCTTGGGTGTGATAGGACACAGCCATGCCCTGAACTGGGCCCTCGCAAACTCCCTGGGGCTCTGCATGTCCTCCATGGTGGAAGAGGTTTGCTTAAGGTTGGGGGGGGGGGGTCAGCCGCTCCCAGCATTGTGACCAAGTTCCCAGATATTGGGGCCAAATTGGGTTGCCATTCATTAATAATGCTCACAATAAGATTAAATCATTCTGGAAAATCTCATAAAATCCCCCTAAGTACGCTCCAGTGGCTCTTTCCAATCCCCATCATTCAGCACTTGGGGAGGTTTGGAAGGAGAAGAAAATTGGTTTCTTTGCTTTTAATGCTGCTTTGAAAAGATACTCAGAGTTTTTCATGCGTGACATGTCACATGTTTAATGTGGACTTGCTGGAAGTCAGGGGGTCTTTAGCGTGTGATATTTATGGGGAATATTAAGTGCAGAATGAGGTCCCTCCAGCTGGGGAAAGTTGAAAGAATAGGAGGCCCAGGACTGGGCTTGTTTGCAGCATCAGAATGACATAGGATTAAGAGTTTGTAAAACAAGGCGAGGGGTTCTCATTGGCCAGTAATAAATGTAATCCTTGGAGGTAATTTCACGCAATTTGCTTCTGTTCCATGGAAGGGTCAAATGAGAAAAAATGACTTAAAAAAGAGTTCATTAACAGGAAGAATGGTACTGTTTCTCGTATACCATCCAACTAGCAGCCTAGAGGGGGGAAAAGAAGCCCTACTAAACAAAAAGGCAAAATCGACGCAAAATTGATATCGACCACAACACACACACACACACACAGACACACACACACACACACACACCCAACTCCTTTCCCTCAGTCTTCTCCAGCAGTCCCGTCTCCTCCCCAAACTCTCCAGCGGCCCTGACCACCCCAGGAAAGCGGCTTTCACTCAGGGAGAGCCTGTGGATGTGGAGTCTGAGGGTTTTAGACTCTCAGACCTCCAGTAAGGCCCTAGAAAGTTCCCACCGGGCCTACTAAACCCGGGAACGGAGTGTGTGGTAGGAATGGTAGTTGGCGGCCGCTCCCCATACCCCAGGCCGGGGCCCTTCTTGCGAGTGCCGCCCCCGTGAGTCCAGGGCTAGCGTTGGGTGGCGGTGATCCACCCGACGACCCAAGTGCCAGAAGCGGCCACCAGCCGGCGAGCCGGTTCCGTGAGCTCTCCAACGTTTCGGGCGGGCGGGGTCTCCGGGCGTCTGGACCCGGGGTTGGAGAGGAGGGGATTGAAGTTGGGGGTGAAGGGGGGTGCAGGATAGGAGGCGAG

SEQ ID NO: 13 - protein, 1614 aa, Homo sapiens
CAACGGAAACATTAGTGCATAGTGACTAAAATGATTTTATTCCTTTGCTACTGGAATTCCCTAAAGTACAGTGGGGCCTATAGAGCCAGCCCACAGCTCATAGGGCCTTTCCTCCATCAGCTTCTGGAATGAAGAATGCAGGAAAACATTGTCTCCATGTTGCTGCAAGAGAAACAATAAAAGCTTGATCAGCTGAATGCTTAAATATGGCTGAATGTTTGATGAGATGAAGATGTAATTTTGTCTATGTTCCCTAAGGATCTGGATTAAATATGACTACAGGGCCTAATCAAATAGCTAGTCACTGAACAACGGTCCCAACTGCATTTTTCATTCTAGGCATGCCTTTCTTTCCCCCCCTCCTCCAAGTACATTACTTATTCACTGGTTTGTCAGCAGTGTGCATTATTAGCGCTTGAGAGATAAAACTTTAAGTGTTGCTCCCAATTAGCACAACAGTGACCACGCACCATGCTCTGTGCTTAATGCCTGCTCTCAGAGAGGAGCTGGTTTTGAAGGTCTGAGGTGGAGGAGAAAAAAAATGAAACAGCTTAAGCATTCATTTTGAGTGGAGAGACAGCTCCTATTAACATTTAACAGCATTTGTGCAACTTGGTGCGGAGGTTATGATGCAAATGAGGAGGAATTAAAAGTGGCCAGGGGTTTGTCATTGATGGATTGCAGTCTGGCGGTGTTCACACTTCTGCCGTGTCCATCAGAAGCGATTACTGTGTAATTAAACCTTATTTCTCTACTCTTCAGTGCATAATTACTTTGTGAATGTAACCATCATCTAAAAAAGCTACCAAAATGCTTTAGCATTTAGTCTAGCAGTCATTTCCCTAGCTTGTGTCAGATATAACCATCAGACAGTGCAAAAGAACTGTCACTTTTAATAAGAGGCAAAAAATTAAATGAAACAGTATGCTTATTACAGGAAAATTAGGCGTTCAAGTGGTAGAGTCCTTTTCTGCTATTTGCATAATTTATTCTTTTTTGTCCCTCACACCAGCAGCTTCAGGCAATTTTCTTCACATTTAAATAGATCGCACATTTAAGGCTACTTAAGGAAAATTATCACTTTGCATATTTTAATTGTTGTAAAGAAAGTGAATAGAAGAGGTCTGCAGCTTGGACTCTTGAGTCGGTCAGATGCTCAACTGTCTGATTCTGGAGCTCCCCACTGCTGCACTAGAGATAACCCTATAGTTCACAGCTATCCACTTGCATTTCATCAGCATGCAAATGCAGCTCCAAGCACTACAATAAATGGATCTTTGATATTTACAAACTAGCCATTAATAACTAAAACATAATTTGTTTGACATAACTTTAGATTCTCTTATCACTGTGCCTTCTTTTTTTTTCTTTTTCAGAGAAAAACCTAAGTCTTTAACGTTTAGAAAAACTGAGACAGTCCACTCAAACTGAGTCATGTTCTACAGGTTCCAGAAATATGATTTGCTACAAAATTATGTCAGTTCCATTATGTTGGCAAGGCAGCCAACATTTCAAGTTCTTTTGTTTAATTTGGACTCACTTTTATTCAAATAAAAAATTCAACAAAAAACTCTTTCCCCCATAAGAATTATAGCAAGCCAATGGTGTTTCAAA

SEQ ID NO: 14 - protein, 1461 aa, Homo sapiens
ATTTCCTTTGTTGGGCTGAATTTTCAAATCCTTTATGGAGCTGCAACAGAGATAAAGGCTCAGGACAAATGCAGCGAACTCCATCTTCCAAGCAGTGCCATAAAAACAGCCTGACTCTTGCCTTCCTCCCCGCAAAGTTCCACATTCTATAAATAAGCATTCCTAACATGGGCCCTCTTAGGCCAACTCTCAGCCTGGAGCTAATGTTTTACAGCAGAGTTATGAACCCCTAAAAATACAGGTTTGTGCCACAAACGATGGCAGGCCCATAAGTATAGCAGCACTACTGGGCACCACTATAATAAGATGGAGATTTCACCATCTAATACCTAGATCTCCATTAGTAAATTCCACAGCTCAGTAAGTTTGCTTCATTATCTTATTAGGTAAAAAGAGCAAGCCAGCGCACCCTGACCAAGTCAGCCTGTCCAGAATGCTAATAGATGTAGCACTAAATTATTCTCCTCTTTTAAAGAGTTGTGTTAGTGACATTTTGTTTTTATCAAGTAATGCAATTAGACTTCAGCCTTAATATCTCTGAGGCTGTCACATCCCTGAACTCCGCAGCACTGCTTGCCAGCCGCAATCAGAAATAACTCTGTCCCTTCAACTTAATGAAAAAGAAGTACTTGGCCATAAACTTGTAGTCATCCTCTATCCAATCATATTGTCTTGAGTAATTAAAATGATTAGCTTAATTAGCTTAATTAACTAAATTTGACTACAGGACATGGCCATATGGTGAAGCAAAACAAAGATGGGAGCTAATTAAAGTTAAAATAATGCAGGTTTTAATTAACTCAACCCCTAGGCATCAACATTTTCAAATTTATCCAAGCTGATAATTAAAAAGTCCTCTTGCCCAAGCAACATTTCTTCTCTGAGCTAATTAAATCTGGAAATGAATTAGCAACACGAAGCTCCAAATATTAATTCCTGCTAGAAGATGACTTCACTTCCTAATGAAATTAATTAGCTGCGCTGGACCTTCAATCAGACGCCAAACGCTGTCCATGAACACAGACCTCATGTAATCTAGCGCAAGGATACAAGCCCTGGGGCAAGAATTTACAATAGTAATGAACACTCTTTAACTGGGTGCCTCTCCTAATATACCAAAGGAACATGAAGATCCCTTTGTGCCATGGGCTTCCTCTCCTGTTTAAACAAGTTGGTCTCACAGATAGTTAAAAAGTAGGTTGCAAATAATATTACCTGTAAAGCATACTGCTACCGGACTGCAGATTAATCAGTTTTAGTTCTCTCCACTGAGGTCGTGGTGTGAGTGTGTGTGTGTGTGTGTGTGTGTGTGTGTATACACTCTCTTATGTGTGTAGAGAGAAAGTATCATATCAAAGATTTGGTATAATGGGGAAAGTGTAACACCAAGACTCAGGAGTCAACTTGATCTTCCTCTAACCAGCTGTGTGACTCAGGGCAAATCATGTCACCTCTCTGGGC

SEQ ID NO: 15 - protein, 2166 aa, Homo sapiens
CATAAGGGAGCACAGGAAATTCACTACTGCTGAAAGCAACACAATTTGTGACCATAAACTACAGAACGGTGGGGGAAAAGCCATCATTTTAAATAATAGGTCCCAAGTCTGACTTAGGGGCGAGTGGAGAGCATTTGGCGTCTCAAATTACTTTAACAGGGGGCCCTGTCATATCCCATGGAAAGGACACTCCGGTCTCCCCTCCACCCTCTAATCCTTCTTTCTTAAAGGAACACTCAGCAAGATAATGAATCCTTTAAATGTTACATCTTCTGTCGTGCATTATTGTGGTGCCGAAACTCTTCACATCAAACAGTCATCAGGACTATTACAAAGTGGGCTTATAAGAGAGGGGCTGAAAAGGAGCTGTGTGAAAAGAAGTGGAAAATTAAAGCTGAAGCAGTCGAAGAAAGGGCTTAATTTACTGGCATGTACAGTATGCAAATGAGATTACTCTCAGCTTAACTGCATCATTTATGTCCATAATAACGGCATCATCATTACAGGGCTCAAATTAAATTACACCATAATTAGCATATCAAAGTGATTGGTTAAAGTTTAAAACAAATACCCAATTTTGTTAATGAACAGCTGTAATTGTCATGTACACTTCAGTGAAAACTCTCTAAACAAATATATGTTTTAGAAGAGAGGAAGATTTTTTTTTAAGCAGACAGGTCTGTAGCAGAGGTAAATTGCCTAAAAAAAGAATGACATGGACTATTCTATTAATGTTAATATATGCTGATCATTTTCAGGTAATAAAACATTCTATCAAAACAAGGCTTCGCTTATATTTAGACACCTTCCCTGCTCTTGAAAGTGACAAACCACCAGAAACCTGCTTCTACTTGCAGCAATGATAACAATGCAGGGGTGACCTGTCTCGAACAAGCAAAGGACATGTTCGGTAACATGCTATTACTAACCCCCCATATTCATTTAAAAGACATTCGTGTTCAAATCGTGCTGAGTCAAAGCTGATTTTTTTCCTCATTCCAGCCCAAAGAGGGAAGAGTGACAGAAAACTTGCTGCACCTATGGCATAGACCAGAACGCTCCTAAGCTGATGCCCTGATAACATATTAGACAGCCTCCAACTCAATTTCTCCTCATCGAATCATAGCTACACAGCAGTTTGAAACACACAGCTGCACTAGGGAAGTTTGCTCTTCCATCATTAAAATACATCAGGAGGTACAGCTAGCTATTGTCAATTTTGGCTGGAATCAGCATGCACACAAATTTCGTATATGTGAAACCAGACACTAATAATAAGCTTGTTTCCAAACCTTTTTGTTATAACCATTTAATGTCAGAAGAGTTTCTATACAAAAAGATTTGTCAATAATCTGGAGGCTCACATGTGAAAAAGCTTTCCGCCTAAGATTGTCCCATTTCTTAACAACGTACCCCATATGTCCTCTGAGACAACTGTGAGGGTACATCGCTGTGATACACAGCATGGCAAGCCAAAATATATTTTGCCCAAAAAGGAAAAAAAAAAAAAAAAGCACTTTCAAATATACTTAACAAGCAAATTGAATGTCTTATTAAAATCGTATTATCTAAACAGTGTTCAAAAATTTAAAGAAAGTAGCTTTTCATTTTATTCATCGAAGAATCCATTAAAGCTTAGGCTCTGAAGTAGTATGTAAATTATGTGCCTTTCAAGGTAGAGCTAGGGCAAATTCACTCCATCAACTAATGATGAACCTCATTATGTGCAGGGAGGATTCATAATGAGGAAAGAGCCACCCGCCATTCCATGTTCTAACATAAATCCCTGTAAAATTTGAATATCTCCCCGTCTAATTAAAGGCTACTAATTCCAATCACCCCCTCCATGGCCCCAAAGTAAAAATAAACCTCTCTAAAAGCACAGACTACAGTTATATTTCTAAAGCAGTACTCGATCCTGTTTGGACTCAGAACCTTCCACTCAGATGTGTTTTTCGACAAGCATAATTAGCAGCTTTCTAAGATAGAAACTTAGGGGCTGCTCAAGCTCATTTTGGTTAAATACACTGAATTTCTATTTTTCAAAGAGCTTCACCTTGACAGGGCTACAGTGCATGCACAGAGATGATCCGCAGCCAAGAAACCAACAGGAATGTGCGAGCACAGTCATAACGTAAAATAAAATTCTTAGCACTCGAGTCCCGT

SEQ ID NO: 16 - protein, 2163 aa, Homo sapiens
TTGCCAAAAATACATTCCTTATTACTAGTAAGCCTAGGCTGAAAATAAGAATTTAACAAAATGTTGTTTTCTGACTTGATCTTGGGGTGTTTTTTTAAACTACTATTTTGCATGTTCACAGCAAAGTTCTTAGCGCTTGTTCATTCCCTCAGATCCTTTTTTTTTTCAATTAAATAGCTGGGAAAATGTGTAAAACTATTAGCTCTAGGCTAAATAAAATGAAAAAGGTAATATTTAGATTAATACACTTTTAATGAACATTTTTTGGGGGGGTAACAAGCAGAGGAACAAAAATAAAATTGCTGTATGGCTGCTGCACTTCAGAAAAAGAGTCAAGTTTAATGATAAATCTGGCCTTAGAGAACCAGCCAGAATGGATAGGGTCTGAATAGGATTTAAAAACCCAACTGTGTGCAGAAATTAGAGTTTTGCCCCTGAATCATATGGAATTACAGTGCTGGGTGCGTGTGCCATGCCTACACAATAAAGCCCAGAGGAAGCAGCTATTTCTGTTGGTTTTATTAAACCAACCAAGCAATTTAATTCTTTTGTTCAGGAGAGTTCTACTTCATTGATTAACAAAAGCAGGGATATAATTTTTTCAGCCTTTTTGAAAAGCCTGAAATGTCAAGCCTTTTAAAGCAGATTATTCTGCCTCTGTGCAGTGAATACAGCCAGAGTAACCTTTTGTCTACAATTAAATATTCTAGCATAAATATAAAAGAAAATCAGAGATGGGAAAGATTGACTCACGAGAGATTGGAGAGGTAGATTCACACAGTGATAGTGCAAGCAGCTTGCTTCTAATTAAATATGCGACTGAGTCTCAATGCATTTGCTTTCAGCCGCAGAGAGAAGAAGCTGCCCAAGAATGGAAAGGAAGAAATATATCACATCATCTGTCTGTCCACAGGCTTTCCTTGGGGCTTATGAAGGTATTTTAGAATTTTTATATTGGCATTTTTCAGGGGAGATAAAGGTGAACCCTCAAGGGCAGTCAGACAACAGTCTTGAAAGTTTGGGCTTCCTTGTTGGTACACTAACCTGACTTTAATAGCTTTCTTATTAGTCAATAACCAAGGTTAATATCAATGACTTTGTTTTTAGATTTGAAGCCATCATGTATGATATTGCCAGACGTATTGCTGTGCTTTGGGTGACCTTTTGTTATTTTGAATTGGGGCTACTTATTGATTTTTCTCTTTTTCGCTTACTTTATGATAAATTCTTTAATGCATATTTTGGTATTTGTACCTTATAAGTATGAACCCAGAAAGCAAAATTCAAGTATCCTTAGCTATTTCTAACAAAATGCATTTTAGAAAATGATAAGGTTTGCAGTTGGAGACTTAGCTTTATTTATATTCATAAGCCTTTCATCTTTATACATACTCATGGCATTTTCAGGGAAGTACTTAAATATGGCACTTATAAAATGCTGATGACATAAAATATGGTTGATCCTCTTAGGGTTTGCTGCTTACACAGAAAAATCGGAAAATAATAAGAATGAAATTTCTCTACTCTATAACTTTACCTTTCCATTTCAGATTTTGACATTACTGAAATTATTGGAATTACTTTGAGGAACTTTGCCTGTTGAGTGTCTTATATGCACATAAGAACTTTTCCCATTTGCAGGTGAAATTTGTATTTGTTTATGAAAATAATTGATTGGATTGAAACAACATCGGAATTCAGTTGGCTTTTAGTTTGTATATTTACTGTACTTAATGTGCCATGGGTTGTGATTTTGAATAGAATCATAGACATCCTGTGCATTTTGGAAGCTTGCCACTGGGAAAGGCTTAATATTTGTAAATTAATAGTTTGCACTCCTCAAAAAGTGGTTAGGGCAATAATTGAATGTTAGCAATAAAGCTTAAAATTTTCCATCTTTTGAGATTTCTCCCTCTTTTAATAAGTAACTTTGTCAAGCAACATTCTCTATTGAAGGGAAGAAAACTTTCAATTGGGTCTTAATATACTATTCACCTTTCCCTTTATTAATATAAAGATTATGTTTAGTACTGTGTTTAACAAGAAATGTACTTACACAAGTATTTAATCTTAGCTTTCTTAAGGAAATAGGCAAATATCTTAGTTACTAATATTAAATATATTAAAGCTTACACATAAAGCACTAAAGGATGTCAGAATTGA

SEQ ID NO: 17 - protein, 1591 aa, Homo sapiens
AAATGGTTGGCTCAAATAAATGGTTCTCTTTTAAGTGCATTTTATCCCTTTAGGTTCACACAATAACAGCAATATATTTTTAAAGTATATATTTTACTCAAAAAATACATAAGTAAGTCAGAAACCAAAAGCTAACAGATGTGTGACTTCTAATTAGTTATAATAATCTCTGCTTCAATGCCATTAGAATGAGCCTTCCTTTTCTTTTGAAAACTAAAAAAGCTTTCCTTTGAATTTTAAACTGTCAGGGTGCTTCAAAGTCAATGTACAAAATCTGCTTTGATTAAAATTTTAGACATCTACAGTGATAACTTTATGAAAGGAAAATATTAAATTATAATTATCCTAAACAGACACAGTCTTGTGAAACTAACCCTACATTCATGTTAAAACACAAAGAGTTGAATATAATGAATTTGATTCATCCTCGGACACAAAGCTTCACCACAGTAAACTCAGTCAACTGTTGCTCTTGCGCCTATATTCATGGTGCTTAAATAGCGCACTTTAAAACAAAAAAAACTCCAATTGGCTTTTCATACATCCACCCTCCCCAAAAATAACGCACTTGAAAAACTCAAATGATATGAAAGGCTTCAAGGCCTCTTTTCTCCCTTTCATACCCCCCTTTTTTTTTTTATTTCTGTTTGCAGTAATCTGCCTTTCTCTTTCTCATTGCTACAGAGCAAGCGAGGAGGCTCAGAGCTTTGAAAAGGGGGCTGTGTGTAATGGGTCCACTAGAATTAATTTACTTGCACCAAATCCATTGAGCACAGAGGTTCTTTTCCCCCCTCTCTCTCTCTCTTCTCAAATCATTTGGAGTCGAACGCAGCCCCCGGCCTTTGTAATTCTAGTAAAGCACTTAAAGTGCACAGTAGGTGTTCATGAGGACCATCTGGTCAAAAGCAAAACAAGCTGCTGATTTTGCCTTTGAATAGAATGAAGCAAGTGTGAATTAGTCTCTTCAATTAGCACTATTACAACCTGTCAAGTGCATATTGTAAAACAGGATTATTACAGTATTGGTCACCAGTGCAATTATTTACTCTCTGCCTTTTCTTGCATATAAAAAAATCTTATGTTTATTAGTTTCTGATAACTGAACGGAATTTCTCTTAACCCAGGCATTTCAAAACTACCAACACATAAATCACAGATGATGAAATGTGGTCAGCTATCATGTTTGATACACATATCTTAAGTAACAAAAGGCTAAAGACTGTTCTTAATTCTTAAAATGTCATTGCTTCTATCGTCTTGAAATGCAGGTAGACAAATACTTATATGGGCCAAAAAAGATATCCAATCCAGATTATTCTAAAATAGTTCCAGAGAGGGGAAAAGACTTGTCAGTTCCAAAGAGCTGCATTATAAATATTAAATTTATTACTTCAGGGGATAATTTGTTAAGAATCACAGGAAACCTCAATATTTATAAAATGATCCCTACTGATTTATATTCATTTGAAGTGGTATGATTTCAACAGATCTCAGTTTTCAAATGCAACTTGAAACTAATAATATATATGCATATTTAAAAGATGCATAATCGTCTTTTCTGAAAGCTGAATAAAGGCTTGAATTCACTGCC

SEQ ID NO: 18 - protein, 1560 aa, Homo sapiens
CCCTGATGGACAGTGCTCTCCTGGCTGGAATACCAGCTACTGCGACTTTCATTTTGTTGTTGTTTTATGCAGGATTTCACACCCTATTTCTCTTGGGCATTTTGCAGGCAATGGTCTTTTACCAAAATAAACCAAGTCCTTTTGTAGGCCCAAACTTCAAGAAGCAGGATGAGGTGTAGCAGCCCCTTCCCATCCTTCTTCCCTACCTGTTATATTTACTAAAGAGAAAAAGTATGTTGTGAGAGGCTTCCTCCGCCAGCACCGCTCTTCTTCCAGCATCCTCAGGCCTGTCCCTCAGCTTGCCTCTGTCCCAGGGCACTGTGACAAGGACAGAGGCTGAAGCCCACCCTCACATAGCCAGCCACTTTGTCCCTTCCTGCCCCAAGCTCACATCGCTGTTCCAGCAACTCACCAGGGCCACGGAGGAGCCGCCATGTAGCAGGGAAGCAAGACCCCTCATCCACATTCTGAGGATGGCCGCCCGCTCACCCATTACCTACACAATCTCTCAGTTACATTAAAAAAAAATCTTTCCCCCCCTTAACAATAGAGAGGAACAAATGGTTGACAAATAACAACAGCAGCAGCTCTCCAACAAAAGCACGCAATTATTACAATTATACTATCCTTGATTAGGCTGCCATGCATTGCATTTCAATGTAATTGATGTTGTAGGTTGACACATCGGACACCAAATATTCTCGCCTGTCCCTTCTCTCTTTTGTTTCAGAAGCTGATTTGCATTTTCTATGCTTTTAGTAATGAAGACTTAGCACTTTTCCTCCATTAGAAAAAAAAAGAGAGATACAATAATCTGCAACTCGGCACTTGTTTAAGGATTCTGACCCTCGAAAATACCACTTTGCTTCACACATTAGCTGCTTACAAAGAAGGAAGCTAATGTATCATCTAATTGGGCAAACCACTGCATCTGATTTCTCTCAATCAGACTATTAGCTTCGTAATTACCCATCTGCCTCGTGTGGAAAAACGGCAAGGCGCACACCCAGCTAATAACGTTCTCAAGAGCTCTCCACCACAATGAGAGGAGGCGACGTGGAGGGATATGGTCTCTAACCATTTCGGTGCCAAGGTGGCCACACAATGCAGGAGGGCTTTGCCAACCTTCCCCCGCCTGAATGTGTTTAATTATTTGTCTTTAATTAGTCAGAGTTTTTGAGGTCTGTTCAGGATTGCTGTCCCTGCTGCTGCTGCTGCGGTGGCGGTGGTGGTGGCCGGGGCGGATGCTGAAGGATGGTGACCAGCGGGAAGGTGGGGAGGCTTCCCGTGGCCTCTGCAGGAGACGCTTGGGTTGAGGGAGGAATGTCCCCGAGTTTGGCAGGTGTCCTCGAGAGAGAATAAAGATTCTCCCAAGATTGGAGTAGAGTGTTTTATACCTCTTTTTGTTCCTTTTCTTCTTCTTCTGTGGTTGAGCCCCCTTTTTCCCCATGTGGGTGAAGCTGCACCCTTTGCGGCAGAGCCAGAGTTAACCTGAGGACGAGGACATCAGTGGTGGCCTCCGCACTGCCAGGGTGTGAACATTCTGACTGCCAGGTGACC

SEQ ID NO: 19 - protein, 1800 aa, Homo sapiens
GTTTTCACGGAAAGCAGAGTCCTATACCTAACAGAGATTACGGTATTGAAGGGTTACAGGTATCTGTTTAGAAATATGGTGCTCTATTAGAAAACAACTTGTTTGACTTTTTTTTTTAAACCCATGTAAAATTTCACAGAATATGCTCACGTTTTATTTTAAAGATCACTAAAATTATATGCATTGAAATACTAATAATCTTTGTAAAAGGTGGATAGATAATTTGTTTACTTTATTATTCATGAAGGCAAGTAAGGCATGGTATTCTGCTATTGTGGGCATATTATTAACATTTCATAGGGATTTGTGCTGGAATGTGGAATGCTGCTTCTTCATAATTTAATACTCCTATGCATAATGAGGTTTGTGATTAGTTGATAGAGAGAATTGGCCCAACTCCATTCTGAAAGCAGATAATTTACATTGTTCTCTAGAGTCTAGAATCTAATAGGTTCTTTAGTGCAATAAAATTAAATGCTACATGTTTTAAATTTCAGCATACAAATCCCCCTGGCAATTTTCTGTTTTTAATTTTTGCCTTTTGTTTCCTCTAAAACAATGAATTTTAAAAATTGTTTCTAGAACATATATTTACCTAGCTCTTTTATTTAGTATGTACAAGTCAATTAGCACTGTTCATTAGCAGAATTGGGTATTTGTTTTAAAGTTTAACCAATCACTTTGAAATGCTAATTATGATGTAATTTAATTGCAAGTCCTGTAATGATGATGCTGATATTATCGACATAAATGATGCAGTTAAGCAGTGGAATCTCATTTGCATATGCTTAAAGCAAGTTGAATTGGGCTGTTTCAATATCACTTTGCTTTAATTTTCCACCTCTGTTCACACCAGCCCTTTGGGTTTTTAAAGCTGTGGTTTCCTATTGATGATCAGTGCTTTCATCTTTATTTTAATGACAAAGGGGCAACAACTGACACTGGAACTGTAAAAATGAAAAGCAAATAATTACTTCTATTAAATATACGAACTATGAAACCTTTTTTGGTAATGATCATTCTTTAGAAACTGACAAATGCATGCATTTTTGGTATTTTCTTATAGCATTCTTACACTTGGAAATGATACTATGAAAGAAATACACGAACTGATATACAGTAAAGTGCTATGCCCCAAGATGTTTCTACTTTGTGAAAAGTACTTTATTGCATCTTAAAATGTTGTAGAAAGTAGACATTGCAATACATTTTTCAAAAACTTTCTGTGCATTCAGATTTTTGTGAGGGTATATTCCTTTAAAAGGAACAACAAGGCGTTATACTCATGATTGAGCTGATATTAAACTCCAGTGGTTATCTGTTTTTGTAGAGGTTTGGACTTGGGTAATTTTCTTCTGGAAAGATTATTTTTCTTCTGACCAATTTCTCCTGTTATGTCCTAATTGGTTACATAAATCTTGTCTGGTATGAATGAGAAATGTTTCTGTGTTGTCAAGTGTAATCTTCACCCTTATTTACCAATTCATTAAGATCTATTGATGCAGGACTGGTGAGAGGGAATGACAACATAAATCAGCCCTCCAACATAATGACCCTAATCAGCTAGAAATAACTGGAAACGTCATGATGAGCTATGTCTCTGTATTACTTCGGCAAGATTCTGTGGCTAGCGAGGTTTGTGTCTGCTTCGATCATTAACTTTACATCCACTCACCTTCTTCTAAAGAAGTTGTAGTGACTCTTGTTAGTATTACAAAGTTCTTTTTCTCAGACATTTGAATCTTTAGGAACCATAGAAGAAAAAAAGAAAGAGAAAAGGAAACTCACAGAACAGACGTC

SEQ ID NO: 20 - protein, 1255 aa, Homo sapiens
TCCAAGTTAATCCTGCCACCTACAAAAGCGTTCTCAGTTCATACAGAGTGTGAGATTAGTAATCACTATTTGACCGCCCCCATGTAGGCAGGGAAAAGGGGAAAAAACGAAACAACAAACCCTAAGATTCAAATGTGTTAAACCTATTTCATCTGTCAGATGGCAAAGGAATGATCAAGCTGCTGCTGGTTTTCGTTGATATGTTTAAGCTTTCTTATTCTGGTAGGGCACAGTAAGTTTTGCCTTTAATTTAAGATGTAGATTTCATTACAATGAACCTCCTGACATTAACAGAGGGCTTCCTTTTTAAAGCTTCACTTTAATTGCTATTCTCATTATTTTGCAAGCTTTTGCCCTAACATATCCCAGGGGTCTTGACAACATGCTTCTTCTCTTTTTAAAAAACTTCAAGGCCTGATTGTGATAAATTGTTAGGGGCTGTGAATAAACACTAGTTAAATTACAGTATCTAAAATAGCTAATAAGGGAACAATTTATGATGTGGAATTTAAAAGGAATCCCTAATTGCACTTCAGTTTGCTGCGAGGATGCGCCTTCTATAACATTAACAGCTATTTTGTTTTGTGAGCTGGCTCTGTGCCAGGGTTTGAGAGCTAATTGGAATTAGAATAACATTTCTCACAGGCCATTCATTTGCTCAGGCTGAGTACAAATTACTATGCAAGGGAGGCTGAGGGTTCCTAATGATACAGGATAATGATGTTTTATTCAGATTTTAACGAGGTGTAATCATTCTGGTTGAGAGAGAAAAAGATTAAGAGGGTGCAACAATTACCAATTTTTACAACTGATTAATCGCAAGCCATTACTTGTTCTTGGTCAAATAGGCATTATAATGACTATTACCATTTTCAGCTATTTTTAATGCAAATTGCATTAGCTTGTAAAACCTTGCCAACTATGCCACATAAATGATGTGCCTGAATGAGCCAGAGCAATGAAAGCATTAAAAAAAAATTCACTTTGACAATGTACAGAGGGAGGTTTGAGTGATGAGCACGTATTTCCAAAATGTTCAGACAGGGCAGGACGTTTCCAGCAGACAACACATTTGGCCTCAGCTGTTAGTAAAGAGCTGAAAGAGACACACACTCTGTCACCGAGAAAGTAAAGGGTAGTACTTCTGTCTTAGGTATGCATGGTGAAAAGTCCTCCCCATTCCATGTGCAAAGCTCTGGTTCAGAGTAACTAAACTTGACAGCTGTACAAGAAAAGGAAGCTTGTCAAATGGCAT

SEQ ID NO: 21 - protein, 1562 aa, Homo sapiens
CTTAGGCAAGCGAGATCAACTTCTATATTCGTTAAGAAACCCACTCTGACATAGAATAGATTCTTAATTATTCAGAAATCAATAGCAAGACTTACTATTATTTTTTTCCATCATGAAGACCTAGTACTTTCCAATTTCAAATACAGTTAAGGGGAAAAAAGCCCTTTCCAAACATGTCAACTAACATCTGAACCATTTTAGACAGTCAAGTGTGTAATGCATCATATGAAAGTATGTCTCACTTGATTTGTTTCACTTTATTTTAACATCATCCTTAAAGCCCCTTTTTCATACATAACTCAAATAACAACCCCCCAAAAGGCAATATAACAACCTTATCTCCACCGGTGTCTACTTGGCACCAGTCTGCCCTGACCTTAGACACAAGCCATTGTTAAGGGTATAACGCATTTACATATTTTGCAATAAAACATCAGTTATTTGCATTACTGTGTCAAGTTTTATTTGATTCTTTCACCTAAAAATGACTCATTTTCCTTTCTTGTATTTTAAAAACCAACTACTCTAAGCTTGTTTGAGAATAATCAAAAATTGCCCATTTAGCTAGAAGTCATTTTCTTTTCAAAAGGCAAATGTTATTTAATCTTTCAGCTGTTCATTGTGCCATCATAAATACTTTCTTTTCAGCACAGTTGTGGGGACTGAAATGAGCCCACTAATTGCCTCCCATTTCGACTGACATGTGGTGGTTTAGTGGAAAGAGAACACAGCAGGGAGAAGGAAATAGGAGGCTGAGAAAATGAGAGCTAATTATTTTCACTGCCTCATGTCAGGCTCTGTGTCAGCCTTGTTTTTACAAACTGGAAGGTTTAGCACTAAATAAAACAAACTGGCGTCATGTTTTTATATACTGGCAGTGTCATGGAAGCAGCTGCACATCTCAAAGACAATATAATGCCTGCGTTCGCATGGACACCATCTGACAGACACTGTGAGCCACGGCTAATGAGGATATCACAGTGGTGCCAAGTGAAAGGTGCTGAATTATGTATGATTCTTCATCAGTACAGCAATAGTCCTGTACATCATTATGAGACATTGTTTTGCTGAAGAGATTAAAACATTCTTAGTTCCAGACCCTGCAACCTATACGCGCTGAAAGAGGTTATTAATGGAATTTTTAGGGAGAGTTTCTTGTGGATTTCTTTTTGGTTAAAAAAAAACAAATCTCATGGGACAAAGCCATGGTGGGTCATGACACTGTATAGATAAAGAAGAGAAGCAAATTAACCATACTTGTATTATCTTTTTTTAAAGGCAGCATAATAAAATATAGTGTAGCAGGGTTATACTTAATGATAAATAACCCAGGTGCTATCACGGGATGTTCCACTCTCCTGCCTTTAAAACTGCAGGTTTCAGCAGCTGAGCTAGATAATAGCAACGCATATAAAGGAGCCTTCAGAGGCCTAAATTGTCAACATCTTACTACTTTTAATACCAGCATGAACAAAATTTTTATCGTATTCTTATTTCATCTTGCATTACTTCATAGATGCCACAACAGTCAGTTGTGACTCTTGTGGCTCTTCCAGTCTTCC

SEQ ID NO: 22 - protein, 1626 aa, Homo sapiens
ATTAGAAAATGGAGTGAGGGGATATACTGAAGAAAGACTAAATTATATTTTTCCCCTAAGAAGAAAAACAAACAAGACAAAATTGAGCCTATTATCGATGATCCAGCCTCCAAAATATTAAATCAACTGACCAGATCCCTTTTTATTTTAGATTAATTTTTTGCCAACACCTTCTCCCTGCCCACTTCTCCCGCAGCCGCACCCCCAATACCCCCAACTCCCCCACCCCCCGAACCTGCCAAAGCCTCCATTACACAATGGCAAGAGCCCTGCACTGGTGACCTCCAACCAGCTGCATTCACTTTCAGAACATCTCTCTCTGCTGGAAATCTAAAGGCCTTTTAGTTAGCAAGCTAGTGTGCATTCAGAAGGAGTAACTGCAGGAAGAGCCCAATGTGCTTTGTTTCTCTGGCCTTTCTTCACAGAAAGATTAATCATCTGTGAAATGGAAACGGCAAACAGCAAGTGACACAAACTGAACCCTTCAAGCCTTTCCTCATCAGTTTTGTGGTTCTGAATCTAAAAGCTGCGTGTGGCAAGGTTCTCCTTACAGGCAGGTGTTAATAAAAGGCTCTGGGGTCTGAAAGGTCAAATTTAGCTCTTCCAGAAGAAGTGCATTTGAGAGTCATCTGGGTGTCTGTTGTTGTTGTTACTAAAGATAATTTATGGATATGTTTTAAATATGCATTTCTCAAAATTTATTGTAACACAATTATTAGTAATCAATTTCCTGGATTTTTATCAATGTATTTTACTTTACCATAATCAGTTATTCTTCTTTAAATATCCATTTGTATAAATTATCTCAATATTTAGTATACCTTCCTTCCAAATTTTGCTGTTACCAACAGGAAAAATAAGGAAAAAGCCTTATATCCTTAGATCCTGATTTGAAACCCTCCAGGCAAAGGACTTCCCACAGATTTTAACAAGGAAGGGGCAAGCTGAAAACTTTTAATGAAATCTAACATGTTCGGCTTAAGAATAATCACTTTTACTCTTCTATAACTGAATTTCACTCATAAATGTTTAAAAGTGGCTAATGTAACACCATTTCCTACAAGGAGAAGATCAAAGTGCTATATTACAAATGCATTATGATTAAAAAAGCCCTGTGCAGCCTTGCTATTAACTGTTCTTTAAACCCTAAAAGGCTTCCCATAGATCTCACTTGGCACTGCATATACAACCTTTGACAAGTAATGTAGACCATTTTTATTCATTGCCTAAAATTGTAGGCAATTATGTGCGTCACACTGGCCACCTGCAAATTCTGAATGCCTGCTCTAGTTGTCAGTGCAAAAAACTAATGTCGGAGGGGATTAATCTAGGGGGAGAGAGTCCTCTTTAATGGCTCCAGCAGGTGAAATGGCCCAGCTGGTTACTATGATGAGTGGCCAGAACAGCTTATGTAGAGACACGCAACAAGATTATACAAAAGAAAGAAAAAACAGTCGTACCATCTTATATTTGGTTCCATTAGTTTTTTCAATTAAAGAAAGAAAACAGACAAAAGAAAGCCAAACAAAAAATAGGGGAAGAAATTAAATTTTAATCATATAAAAAGTATAAAATACTTCTGTAACTACAAACATTTTTACAAAACCTCAGAGCCTCAATAAGTGC

SEQ ID NO: 23 - protein, 560 aa, Homo sapiens
TTTTCTCCCCCGCTTCCCAGACCCTCGTCCCCTCCCCGCAACCCGAGTGCGGCTAATTCCGGGCGTCTATATTCACTCAATTAGAGAAATCTACAGAGAAGATCGATCTTCCATCTGCAGACATGCCAGCTTAACAAATTAGATTCTTGTTTCGTGCAGGTGATTTGGTGACAGTTGGGGAATTAGAAGTAATAAGTTGTTGTGTTTGAGCCCGGGCCCCCGCCCCCCGCCCGCGCCCCTCCCCGCCCGGGGGCCCCTCGGCCGCGCCCGCCGCCCGGGCACCCCCTACCGCACCCCCCAGCCGGCCCGCGCCGCCGCCGCCGTCGCCGCATCCCCCGCCGTAATTAGTGCTGCTGCCCTCCATGTGGGCTCGATTAAACCGTGATTTAGCCGAAAGAAATATAATTATGGCTGCAAATAAAATAATCAGCATTGAAGAGCGATTTCCTTAATGAGATGGAGCGGTTGCACGTCACGGAGTAAAGGGGTCTCATTAAGAGGTGGTAATGAGGCTTGGGTGGATGGTGCAGTTACAAAATAGCCCAACTCCTCTGCAGGCC

SEQ ID NO: 24 - protein, 1019 aa, Homo sapiens
GGGTTTGTGGTAATGCCCAGTGATGAATGTCATAGCTGGCATCTTAGATAAAATGTTCTTTCTGAACAACACCCAAATATGCTTAAAATTGCAGATGACAGTTGTAAGCCTTTTTGCCTGCTTATCTGTCTGCCTTCGATGTGACCCTAAATTAGGCATCAGAAGGTGTAGAGTTTAATACAGATTCCGGGCACAATATACCTTCTCACAATTAGTTGAAAGTGCTGTTTTGTAATTAAAGGGTGAAGTGGGGCATGATGAACATATGGAAAAGGAGACCCTTAATAAGTGATGGAGCCTTCAAAAGAAATTGCTAATTAGTATGCATTTGATGTGCACTATACCAATTTTAAGACTTTGCCTTGAATAAATTGCTATGTTGGGTGTTCGAAGGAGTGGTGAGATTAGCATTTACAAAGGGGGCAATTTTCTGTCTTCTTGACTCTGTTAAATGGAGGAAATAACTTCCAAGACTGGAGCAGTAGTTAGCCCATCAATCATTCTCACAGCTGGAAACTGGGGATCCCAAATGCAGAGATCAGTTAATCCGTCAGCTAATAAGTTCATAGTGGCACCATATGGCGCAGGGCCACTCCACACTGGGACAAGGACAGAACTGTTTACACAGGCATGCTGCTTTCTCAGGTAGCTCCCTGCTGACAGAATCCTTTGTTCTGAAGGATCAATTTACTTTGCACAGTAAATTGACTGAATTGATCAGTTCAGAGCATATAATTGTTGGCTAATCCTGTGGAATCATGTCCCATCCATGTGAGAGGGACAAAAGGGTGCTGCCCATGGCCTGGTCTGGGGCTCCATCCTGGGGCTATTCTCGTCGGATAGGTTGGACACTGATTAAAGGACCAGTGGACAGTAGATGTGTTGTCAGCATTGACTTCAAACGCTAAAGGGAAGAGAAACCTTGCAATGCCCAGAAGGGTTTTCTGGGTGTCTTTACTCAACTGGTATCATGACTTAACTTGGAATAGAAACAGTCAGTCAAGGCAATTTAGGTGCAA

SEQ ID NO: 25 - protein, 1703 aa, Homo sapiens
CTTTAAATTGCCAGCATGGTGAAGATGTAATGTGTCACCTAGGCCCTTGTCTTTATTTCAGTCTGTAGTGGTGGAAGCCACAAAACTTATACACCATATTATCCACTGCAATGAGAATACAGCTAGCCCCAAATCAAATGCTTTTCTTTCCTCAAAGCCTCAACAATGTTGCCCTCCCCCCCTATAAATTAGCAGTGTTTAGAAGGAGACTTGTGCACATTCTATAGATTATTTTAAGGAAAAGCTCTGTCATCCATAATACATTTGGGCTTCTTTCTAGTTGAAGATTTATAATTTTTTTATTGATGGGTTATGAATATTGACACAGGAGATATTCATTGTTTATTGAAGGCTTGTTTACATAAAAGATCTTCACAGGCTACCCCCTAAGTCTAGAGGTCCTAAACCAGTGTCAGGGAGCTGTCTGGGTATTTTTTCCCACGTATTGCACTGCCATTCTACCAACAATAGAGGCCCATTAACGTTTGGCCCTTCAAGTTACTGCAGCCCAAGCCTCAGTGGCAGGACGTCTGCCCAATATGTAAAATAACGGAATGAATGGATTCCTTGGAAACAATGATAACAAGACCTGGCTGAGCTAACTGTGACAGCATGTGGTAATTTTCCAGCCCGCTGGCCCTGTAAAGGAAACTGGAACACAAAGCATAGACTGCGGGGCGGGCCAGCCTGAATAGCTGCAAACAAGTGCAGAATATCTGATGATGTCATACGCACAGTTTGACAGATGGGGCTGGACAATTTTTCCCCCTTTAAACGTGTTCTTAACTATTTGTATTCCACTGGCTTCTCACTTGGGAAGTTCAATCCTGTAATCACCTGCTTGAAAGACTAAACAAACCTTAACTGTCATGTGCTTGATTCAAGTACCACCAGTTTTATGAAGAAAAATGATATCCATTATTAGTGGCTGAATGCTGAGGGGAGCAGTGGGGGAGAGGGTGTTGCTGTGGATTAATGCATCATCTCTGCTTTCAGCTGTGGGCCAGGTTTTGAGTCTAGCTCTGACTGAATCCTGCCATACACTTTGAATAGCATAATGAAGTATTGTTATTGCCTCAGTCTAGTCATTACATCAGGGAAACAGACATCTAAAGTTATCAAAACTGATTACTAGCTGAGCTTTTGTGTCCATAAAATAAATGCATTAAAAAGAAGGCTTTTTTTTTGTTGTTCTTATGGGTGTTCTATCAAGGTTGGATGTTTTAGTGTTTATAGCACTATGTGTCACTGTGTGTAAGTTGGTGTTAGGGTATATCTGTAGTCAGTACTCTCCCAAAACATGCCCATATGTGGATCTGCATGCGTGTGTGTTTAAGCTGGTGCATGGGAGACAGAGAAAATGAAGATTGACAACATTTATAAAAATGAGACACAACTCAATTAAAATTCACCGAAAATAGTAAATGAACCAGAGTACTCAGTTTAATTGTAATGACACAAGACTGTCTTTTTCTACCCTTCAAATAAGTAGCTGCTTTGGATCTCACATGTCTTCACCATTTTATTCATTTGGTTCTTTTTATTTACTTTTCAAGGAATTTATGTAAATATATGTAGGCTACAAAATAGGTCTCAGATACAGCCTGATTCTGTAATCTTTTCATCAAATAGCTAACCAAAGAGAGATAGCCAAAGGATTCTGTTTATGGAGAAGTGAGATCTGTTCCACAGAAAAGCATGGC

SEQ ID NO: 26 - protein, 1111 aa, Homo sapiens
TTGAGGTTTAGAATGGGGGTGCTTTTCCTTATTTTAAAAGCTTTGCAATTTAGACTCCGAGAGCCAGGACTGGTTTTCTATCCATCGGGACCTGCTCAAAGGTCACACTCAAGATCATAAGCCATGTTCACATCCTTCTTATGGGAAAATGATAAAATAATATCCACAGGCATCTGATACTAGGGGCATGGCCTGGACACACACCTTGCCCTCTTCCCCTTGGCCTTGTCTGCCTTGAAGAATGAATAGATCCATCCCCAAAGTTGATGCTTCGAAGTGACCAGTCAGATGCTAGCAGGTCAGCTGGCTATCCTCTTGGATAGAGGGTCCATAAATTAAAGAAATGTTGGTGTGGTTGAAAGAGGAAGGTAGTCCAGCCCAAGGGAAGTCACGTAAATCTCTCCAGGAGCTTTGTTCCCAGTAGGGAGTGGGGGTGAGAGTTGGGGTAGCTCGGGGCTGTGGGCTGTTATTAATGCCCTGGCCCTCCTGCGGTGGGTGCTAACTTGTTGTGCATGAGAGCTGCCACCATCCTTCCCAAACATCGGGCGCTTGGAAAAGTCAAGCACAGTTGAGCCCTGATTTTCATTTAATAGTCAAAACCAAGATGCATTTGGGCTATGATGATAGGACAGCTCCCTTGAAAAGATTATTTGAACTACAAAGGCATTCATTTAGGGCTAGCAATGTTGCAAAAGGGCCCGCTAGAAATTAGCAGCCTGTCCTGGTATTTGGAGAGCAAGAGTGACAACTTATTGGAAGTTCTCAAGGAATCATTTATATTTCACACTCCACTAGGCAGCTGATTTGAGATTGTCTGTTAGCATAACAAAGGCTCTGAGCCTGTGAACTTCAGAAACCTTTCGACCTCTTAGCTGCTGGCATGAATAGCCCCCAGTCCTGCCTATAGAGATCTCCCAAAGCTCCCCTGTTCGTGGCTAAATTGTTAATCAGGGTAATTTAATATAGTTTTCAATATGCCTCATCTCTTATTGGGAAAGGTATTCACAGCTTCCCTACCCCTGAAAAAAAAAGTTCTTTTATTCAAGTGTGAGAGGGGCAGCTGCAGACAGACCCCCATCCCTTGCTTCTCCCCCTACTCCTTCACAGCAGC

SEQ ID NO: 27 - protein, 614 aa, Homo sapiens
ATTGGAATTCAGTATTTATTTTGGCATTTAACAAAGTAATAAATATTTCTCTATATTCTGCTTAAGTAATGGAACAAATAGGACTCAATATATTACAAGGTTTAAATTATAATATTTTTAAAAAGCAACAGTGTGTGCCTCAAGTGTTGCAAACTTGATTTGAGCATTTTATGGTACTCCAGTCAGCTGCCTATTAAAAGTGTGATCAGGTAGTTTAGACTGTGACTAGCTGTGTCAACAGAAGGAAAGTGGAGGATTAGTCTCTATGGCAACGACAAAGTATCCCTGTTTGTAGACAGACAAATTCTGCTACATCTGAAACTGATTGACAGGTCTATTCCTTTGCAACTGACCCATAGAAATTAGCAAGTAAAAGTTATTATACTGGGTTGTATTGAAGGGTTCTCAATATCTTAAAGTGCTCTTGTAAGTTTTTCTGCAGCATTTGCATGAGAAACCTGGCAGGAATTGTTCTGAGGTTTATATCTATGGTTTGATAGATTCTTTGTGGGGGAGTATTGCTGGTGAGAATAACTTAATTTTCAGTTCTCTGTATGACAGAATTGTTGGAGCATGGATTGAGGGGAAAACACACATCAAAGACCCAAAGCTGA

SEQ ID NO: 28 - protein, 1337 aa, Homo sapiens
TACCTGGGGAACTTCAAAATTGGCACTTATAATTGCCCCCTCCTCCCTCAATAATACTTCACAAAGCATACTGTCCCTTGTAAAAATATATTATTTCAATTATGTGCACAGTGGTGTTTTAAGAAGAATTCCAAATTTTCATTCACATAATCATAAAGACCATCTTCCAGGCTCCAAAATTTAAAAAACTAGAACCTCAACAATAATATACAACTCATAACAGCAGCAACATCATCAAAAAAACTACAACACTTTTCTTGATTGAAATAAGCAAAAAGATATCACCAGACAAATGTATACTCCAATTCTCATTTTGTCTTTTTGCTGGAACATTAAGGAGTTTTATGTTATCACAAAACCTCAGAAACTACCAAGCAGAAAAGAAACCTTATTATGAGTAACTGGCAGTATCTCATTAAATCTTTCAATTGTCCAATCGTCCACAGCAGACCTCCAAGAGACTTGTATATTATACTCATTGCAATTAACCAAACAAAAGATTTTAACCGCCAGAGCATTCGGGAAATGTTTGGTTGAGGCTGAAGAAGTGAAATTATATTCCAGGGTTGGCCAGATGTCACAAGGGGTGATATGCATGTGCTCATTTCATCTGCAGCTTTGTGCTGGACCTGTCTATTTACAGCACTACAGCTAAGCACTCTGAAGGCCTATTCACTCATGAATCCTTTCAGAAAGTGCTGAAGCACCCCTTAAGCCCACTTAACTACCATTTTCACACACTCTCCCAGCTCTCCTTTTTGTCCTTGCTTACATTACATCAAACACAGGAACAAAGCAAGAGAACAGAAACTCAGAGGCAGAGAATAGACCCATCACAAATATTAATTTGAAAAGGTGTTGAAGTGCAGAATCTGCTTTTATGCACAAGGACAACTTGCATTTTTTGTGTGAGATTCTCTTAGCTGCAATAAGCTAGGTTTTCAGCCAAAGAGAGGCAAAGACTCAAAGTGCAATTATACACAGGGAACTGCTTCAAATCAAACAATGCTCCGAACTGCTTTAGATCTATAGTGATAAAGACTTGGCAAGCACTATTAAATAGAAGCCCTATATGAGATGCAGAGTTCACTCTATGGATGCATACAAAAGAGAATACAAAAAGAATACTTTTCACACAAAAGTAAAACTACAATTTCACTTTTAATTCACTTGCAAACAACACTTTAATACAATTTCTTTTTATAAGATTCTTCTTAGCATAAACTATGACTCCTTAAAAGTAGTTTCAACTAATTTTTACTATATCTGTTCTTAACATGCCAATTAGAAGTTCTATACTACCTCTGGGGGGGGGAAAACCACACACCACTGTGTCA

SEQ ID NO: 29 - protein, 453 aa, Homo sapiens
CCCAGAAATGGCCATACTCAGTGGTTTGTCCCAGGCCCTCTAGAGCCCCTCCTGTGCCCAAAGGAAACCCTGGTGCCAAAGGCACCACCAGAACCAGGCTCCAGATGGCCATTCAGGCCCTGGGCGAATTGCCCCTACCCCTTAACCAGCAGGCCCCCCACATAAGACGTCACTATTTAATTAGCCGTCTCTGATTAACCAAACTTGGCATTCGGCTCCTCTTGCCCTCATCTTTCCCAGCTCCGAATCAATGGCTTTGATATGCTAATTAGGGAGTAATTTAATTTCAAAAGGCCGCAATTAACAAGGGTGTTGTGGACATGCTGTAGTTAAGCGGAGTAATCTAATTTGCATTAGTAACAAGCAGGGACTAATTAGAAGCTTAATTAGACACTTAGATGGCTCTTATGTTTACTTTCTTAATGAGATGGAGTGGGATCTTTGGTTCTCTTT

SEQ ID NO: 30 - protein, 1164 aa, Homo sapiens
ATGACCTGAGAGCGTTTCCTGGAAGCCGCGCAGCCCCTCTCCCGGCCTCCACCATCGGGGCCGCTCACCCTCTGGGGACTCTGGCCCCGGGACCCCGGGATCCAGGCCCGGTGCGCGCGGCTCCGGCCCCGAGCGCGCTGTCCAGGCTGGATCCCCACCAGGCGGCGCTGCGCCCCTCCGAGCCCGCCCGGCCGCGCTCTGCAAACCGATGCTGTTTAATTAACGTGCAAATTGAGTAGATTAAATGACTCTAAATAATTAGCCACAGATCCTACAAACAGGATAACAGATTTAATTAAGCAGCGATATAGATTTTGGAAACTGTTAATGTATTTTTAGAATGGCAGCTCAGATCCTTCACTTTTCCCCCCTAACTTCAAACATGTAACTACGGCCCTCCGAACGTGGATAAATATCTGGAAACAAGATTACGCCTGTTAACTTCAACTAATAGAAATGTGGGTTTAACAGGAACTTGCACGGCTCCGGCGCCGGCGCCGCTGCAGCCCGCGTGGCCCGGGCCGGGCCGGTTCTGTTTGGCTTTGTTGTTCTTGGTGCGCGCGGTCTGGCGCCTGGGCCCTGGGCAGAGAGGGTCAGAACATACAGGAGGAAGGGGAAGGGAGAAGGTGAGTGAAAAATACAATCCAATTTCATTATATCAATCACATTTAATTGGCAATTTGTACGAGCAATGACCGGGCTGGCTTTAGGTAAAACTATTAGACGACAGGCGGATGTGCTACTAAAACTCTTGGTTAGTTAATTAGTGTCTGAACTGCGGAGGGAAAGGATCCTAGATTTACTCTCTACAAAGAGAGAGCAGCCCAGACAATTCATTAGGCAGGCGGCTTGTAAATTAGAGCTAAGTTAACCTGATTTCCCTTAATTAAAACATCTTTTCTCGTTTACGATGTGGATATAAGTAGATCTCCAGGGTTTTGAATTTTCTGCAACAGCAGATGGTCAGCTAGAAGCAGATAATAGTTAACGCTTTCTCTCTACCAGATCTGAACAACGTGAGCCGCCGGCCCATCTGAGGATTAAAAGGAGCCATAACAAAGAGTGTTAACCCTTCGCAGTCTTCCAGCTCCCCAGACTCCAAGGGCGGAGCTGCCCCTGGCCTGGGGGCACCAATAGGGCACCGGTGACCAGGACTGCAGATCC

SEQ ID NO: 31 - protein, 613 aa, Homo sapiens
AGCTAATCCTGCCTCCTGCCTAAGGGTACTCTGGGAGATGATTGAAATTTTAAAGATATAAAAACACACTAAAATGGTAACAAATGACTCAGCAATGTGCCTTCTAAGGTGGACAGATTCTTGGTAGGCAGCCCTAATTGCTGCAATCGTTTTTAGGTATTCTAATGCACTCAGCTGAATTATGCACCACACTGCTTCTGAATGACACAGCCATTTCTGACTCCATTAATATGGAAGATTTCAGCCAAATGCTCTTAAACGATAGCTTCTCTTTATTTGTAATTTCAGACTCTATTGATTTCCTTCTGTTCCCTTCATTATGATTTCAATTGATTACCTTGGCAACTGCAATAACAATGATTGCACTTGACACTGTCTGAGACTCTTGAGATGGTATTTGAATAGGAATGGTATAATTTGGGGGAAAGTGCCTGCAAGAACCTGTCATTAGCAGTACACTTACACTTTACTTTTATTGACCTTCCTCTCTTTCGAGTGGGCCCTTGTCACAGAGTTGGCTGTTAACAGGGCTACAGTAGTAGTTCAGATTTCTGTGCCTCTTCAAAGAGTAAAAGATTATTATTATTAAAGAGAATGGAGTGGGCTTGCATAT

SEQ ID NO: 32 - protein, 1367 aa, Homo sapiens
CAATGTGGGAAGGCAAAAGGAGAAGCAAAGTAGTGAAGTGGGGCAGCCCAGAGGGAGGGCTAAAAGCAATTCCCAGCTGCCGATAGATTTCAGTTCATCATTGTTGATTTTGGACTAAAACCTTCTTTCCAGCCAAGCAGGCAAGCAGAAGTGAATTTATCAGATGTGATTTTTATCAGAACCCACCGTATGTGGCGGCCGGCAGTCACCACGGGACCCCGGAGCCTGTGATTGGCTCTGACACATCCGACCGAAAGGGCTCTTATTCCAAGAATGATCTTCTTTTTTAGATGGTATTGAGTTGGGACTGATTTTGATAGCCAGTTTCAGTCAAGAATCATAAAGTTATTGCACATTTAAAACTGTCGGTATGAGAATCATTCTCTCCCTCTTTTCTCTCTCATCATTTCGCTGGGCTGCAAGGTTACAGAAAGGTCTAATCAATTGTCAAACTCTCTTTTATCACCGAGAAGGTGGTAAGAAAAAAAAAAAAAAAAAACACCTCTAACTGCCCTACTGTAGGGGGTTCTTTCACTACACAGCACCCTTTTCCACATACAATGCTGCCGTGATTAATGTCCTCCCACCTCAGACCTTGTTAAAACCTGTTCTCTCAAGCAGCCAGTGGAGCACAGTGAGAGGAGGGCCGAGGTTGCATAAATCAACGTGTTCTCACAGCCCCCAGGATATCCATTATAGATGCCAGCTGGATGGCTGGAAGATAGAGAAAAATGAATATTGTATCCTGTGGCCTTTTGCCTCTAATGACCACTTTTCAACATTTTTGAAGGCATGATTAAATTTTGATAACTGGGGAAGTCACTCTGAGCAGGCTGAAATAGAGATAAATTGACGGAGGGTCTGACATCTCAGTGGAGAGCAGGCAACTAATTAGTGTGTGAAGCGCACTCTGAAAGAGATGTAAAAGGGAGGCAGGTTTAATCAGAGGAGCTGCTGAGGTACAGGAATAGTCAGAGATAATTGCGGCCTAGGTAGAAATCACAGGCTCAATGAGCGGCTTTTTCTGTCTGCTTGATTGGCAGCCGCTGACCTAGTGGCCGGCACCCTTGAACCCTTACAACAGCAACGGCCTTGTCAAAGCAATTTGCTTGCCGCTCTCCGTGACCAGTTATTTCAGCGGCAGAGCTGGGACACCCCGCTGGAGAGGGCACTCCGCTCGCCTGGCTGGCAGGGAGCTGGGCGGAACAGCCTCGTTATTTCTGATGACTTTACTTTTGAACCCAGTCGCCCTTTCTTGCTCCCCAACTCTCCATAGCCCACTCACACAGAGGCGTGCTCCCGGGAGGGACAGCTTCTACAAAGACACAGTGTCAGGGCAATTTGGTTGTTCATTTGAGGAGTGGGGA

SEQ ID NO: 33 - protein, 1602 aa, Homo sapiens
AGGTCATTTCCCTTGAAATCTTCAGGTCGGTTTCCCACTTGCTTTGAATGTGTGTGCTCACACAATTGTTTTCATATCCTTCTCTCTGTCTCTTTTTCTCTCTCTCTCTCATCAGGAGCCTTTCAGGGTCTTGCCTGTAATCTGTAATTCCTGTTCACACGACTGTGGGCGTTTTAGGACGTCCCTGGGCAGTTATGAAACTACTGACCGGTGGAGCCTTTCTTGCAGATGGATTTCATTCAGGACTTGTGCTATTATATTAATGGGTTTAATTTAAACAGGACTAGCCTCGCTGGCCAAATTACTGCCATTTAAATCAATTGGTTTAGGGGGAAAGGCAGCCTGACCAGAGCTATTAGACTTCAATTTATTACTGTATCGGCTTTTAAACTGGGCAAAGCAAGTTTGCTAATGTCTGTCCTCTATCCTTTGAGCTTGAGTACAAAACACAGTAATGAGAGTCTTTCGAGTTTTTTTTTTTTTAAAAAGGGGAGGCGGGAGAAAAAGAAGAAAAAGAAAAAAAAAACATATTCATTTAAGTCAATGTTTTATGAGCCAAGACCAGGTAGCCCTCCAAAGAATGCAAACCATAGGATCCTGTGGGTGCCGTTCATGTCCCTTCATTAAATTGAGATTCAAATAATCTAACAGATGTATTAGTTTAAAAAGACTTTATACTTGGATTTTCCCCCTTATAAAAAATAAGCGCTGCTTTTTTTTTTCACACATTTCAACCTGATTCAAATAGAAAAGCAAAAGGGAAGAAAATGCTTTAGATGTGCTCTTTTGATTTTTTCCAATCTCGCCTGAATAAAATGGAATGAGAGATCAAGAACACTCAATTAATTGCAACATTGGGTGTCACTAGGAGAGGGAGGGAGAGATGAAGGGAGCATTAGGGATGCACAACCCTTAACAAATGCATAGATTCAAAGAAGGAAGAAGAAGGGGAATAAAAAAGCGTGTCTGTATTTTATTGCACTCGGTAAGCTTTTCGCTTGTATTTATAGCTGCAATTATATCTCAATGAGGTTTGTCTACAGTGTTGGCTTCACGCTAATTTTCCCCCTCACTGCATTCTTGGAATAGGCTCGGACTGTTTATGAACCAGACATATTGACCTCATTTACAGCTAGCAGTTTAAATCCATAATTTTTCCACCCACAATCCCTCTTTGACATTCCGGCGGTGCGGCCGGCTCAGCGAGACTGAACTAAAAGTCTCACACTTCATTGAACACCATTATGCGGCTTTATGCTTATAAGCCTGTTTCCCTCGGCTGCCTTTCAGCTTTGCTGGAGATCGGTTTGGCCACAGGCCGGCAGTGATTAACTGGAAGAATCCAATAAATCACCCTGTCAGCCAGCAGGCTCTCCTCACTATGTCTACACATCGACATTTGGATTTGCACCTCTCTCTCTCTTTCTTTCTCTCTCTCTTTTGATTTTCTATCCCTCTTTCTCTCTCCGCCCCACTTTCTACAGAGCCATTAAAACACCTCTTTACCTTCACACAAGGTGAACTTGAATCGCTATTGTGAGTATGGCTCACTCCCACCAGCCCTCTGGGAGATAAACCCCTTTGATTTGTGGAGTTTTCCCC

SEQ ID NO: 34 - protein, 1117 aa, Homo sapiens
CCCTCTTAGGCCAACTCTCAGCCTGGAGCTAATGTTTTACAGCAGAGTTATGAACCCCTAAAAATACAGGTTTGTGCCACAAACGATGGCAGGCCCATAAGTATAGCAGCACTACTGGGCACCACTATAATAAGATGGAGATTTCACCATCTAATACCTAGATCTCCATTAGTAAATTCCACAGCTCAGTAAGTTTGCTTCATTATCTTATTAGGTAAAAAGAGCAAGCCAGCGCACCCTGACCAAGTCAGCCTGTCCAGAATGCTAATAGATGTAGCACTAAATTATTCTCCTCTTTTAAAGAGTTGTGTTAGTGACATTTTGTTTTTATCAAGTAATGCAATTAGACTTCAGCCTTAATATCTCTGAGGCTGTCACATCCCTGAACTCCGCAGCACTGCTTGCCAGCCGCAATCAGAAATAACTCTGTCCCTTCAACTTAATGAAAAAGAAGTACTTGGCCATAAACTTGTAGTCATCCTCTATCCAATCATATTGTCTTGAGTAATTAAAATGATTAGCTTAATTAGCTTAATTAACTAAATTTGACTACAGGACATGGCCATATGGTGAAGCAAAACAAAGATGGGAGCTAATTAAAGTTAAAATAATGCAGGTTTTAATTAACTCAACCCCTAGGCATCAACATTTTCAAATTTATCCAAGCTGATAATTAAAAAGTCCTCTTGCCCAAGCAACATTTCTTCTCTGAGCTAATTAAATCTGGAAATGAATTAGCAACACGAAGCTCCAAATATTAATTCCTGCTAGAAGATGACTTCACTTCCTAATGAAATTAATTAGCTGCGCTGGACCTTCAATCAGACGCCAAACGCTGTCCATGAACACAGACCTCATGTAATCTAGCGCAAGGATACAAGCCCTGGGGCAAGAATTTACAATAGTAATGAACACTCTTTAACTGGGTGCCTCTCCTAATATACCAAAGGAACATGAAGATCCCTTTGTGCCATGGGCTTCCTCTCCTGTTTAAACAAGTTGGTCTCACAGATAGTTAAAAAGTAGGTTGCAAATAATATTACCTGTAAAGCATACTGCTACCGGACTGCAGATTAATCAGTTTTAGTTCTCTCCACTGAGGTCGTGGTGTGAGTGT

SEQ ID NO: 35 - protein, 1819 aa, Homo sapiens
AACACCGTTGATCCAGGTTATAAAACTCAAATGCTTAAATATTTTACATTCCTAGATAAACTGATTGAAGAGCCAAGACTTGTCTTAAAAAAAAATTCTCAGCTTACACACTCATTCATTCGCGCGTGCAGACACACACACACAATGCATTTAACATACCCACCCCCCCCCCACCATCCTGCAAAGTTATAGTTCTCAGGCTTTTCAATTTTTATGTTTTACATTCCTATATTTAACAGATTGATATTTTCCTGTTTGTTCTCTTTAAGATTTCTTTTCTACATACAGAGTGTATTCATGTGCTATCCTAATGAGGAAATGACGAGTTTTTATCAACCTTATTAAACATACACCCAGAAGATATCCATTTGAATAAGGGGCCAATTACTAAGTGTGTCTTCAGTTAGAAAGAACTTAGCTTTTACCTTGTACTTTGGCTCTCCATGTCTCTAATTAATTGAATCTTGAAATCGTTGGACTTTCAGCTTAAGAGAAGACTGAAGAAGGGAACTTAACAACACTGCCTATTCCTTTATGTCTAGAACGGGCTAAAAAAAAAAAAAAACACCTGTAATGCTAAAAGACTCAGGCTTTTGTCTGTTTCTAATATTACTTTTCTGCCTAATTGCCATCACTGCCACGTACATTAGGCCCTTTTTCAGCAGGGTTAAAACAGGGCCAGTGATGAATGGAAAACTGATTGTACTGCTGTCAAACTTGAATGTGAGGCTTATTCTAGAGATAGAAGTATGAGGAAAAGGACAGAGAATTGCACTTCATTAAAGCTCTACCAAGCTGATTGGAGTGGAGGAGGTAATTGAGATTTAAAGTGGCATTCCCATCACACTGTCCCTTTTTCAACTTAACAACTGTCATTCAAGCCACATAGGGCAACAATTGGCCAGATTTCCCAGCTCTTCTGAGTAATAAAACAGACACTCACCTTCTGGCTATTCGTTTTACTTACTTTGTTCTAATTTCCAATTCATGTGTCATTAGTGAACGAAGATTGACAAGAAATAGCTTTGACCTCACAGATTTGACCTTCAACCCCAAAGACCCAACTCTAGTCTGAACATAGGTTGGAATATGCTAAGAAACACCTTTCCTTTGCACAAGAATGAATGGCAGTTTTTTCATCATTGTACCACCCCCTGCTTGCCACTACATTTAGACTATGAGACATGTCAACTGCCTGTCACAATTACAATAGACACAGCAAACCAGAATTTTCCCCAAATCCAAGGGGAACTTCGCGAACAAAGAGTAAATTTTATTGCACAGATTTTGGAGACCTCCAATTTGTAGAGCCATAATGAATGCATCCCACAGACAAATAGGTAGTTGTTAATTATCCCAGCAATTTCTTTTTTTAATGTGCTAACAACACAGCACGCTAAGCCTTCATATCCTACTCTGTTACCTGATGATCTCATCACATTTGCAACGATGGTAGTCTGGGAAGAAGGCATTATTTTAGCAAGTATGCATGACAATAAGTTACATGATTATAATCCCTTATTTTCATGATTTAATAAAAAGAAAGTGTGATATTTTGGAAACAAATGGGTTTAGCTACACCTTTACTAAATCAGTTGAAGTAGTTTACCTATAGAATCACTTTATGATAAACGTAATCTTTGTATTTTCCTTGACTGAGTATCCTAAAGCTTAGATATACCAATTTTGTGTCATCAAAACATGCTGTGGATAAAAAATGTTGAAGGGCAAGACCTATGACCTGAATAAGAACCCTCAATGAATTTAAAAGTATTTTATGCCTTTCACACAGTTTTGAATAGCAATTGGGTCCTGGAAA

SEQ ID NO: 36 - protein, 974 aa, Homo sapiens
TGAGGTGGGAAGCAATAGGACAAGATGCATATTAAAATGATCAGCATCAAGGATTTTACATGAGGATAATACGGACATTTTTGAGTCTTAACATAAACAAGTAATATGGCACACTTTTAAAGGGGGTATATGGTTATAAATAGAAGAGGATGAAACTGATGGTACAATCTAAATAATACCACATATCTCACAACTTGTTGGAAAGTACTTTTTTCATTGGGGGAGATTCACAGCTGCCGAATTTTCTGCAGTTAATAGAGTCCTTTGATTCACAGCAGTGCCCCTTGTACAAAAAATACTGGCCTTTGTGTATTACCAGAAACTAATTTTCTATTTGGCTGAAAAGGGAAAAATGGGGTTATTGCTTCTCCCTCCTACAGAGCTTTTCATTATGCCTGATGCACTCAACTTCTAAGCTCTTCTGAGAAAAAAAATAACTGAAGAGGCAAGAGGTAGAAAAATGAGCTTGTTAGCACATTAGAAGTGAAGTATCTTGGTGGGCCCTAGAAATTCCCAGTGGTGTGTTAACTTATCACTCTATGCATGCTGGCACTGATAGTCTTCCAATTGATCACTCTCTTTTCGCACCAAAGGTGCTGCCAGGAAGCAAAGGCTGAAGGCCCACAGGAGAACAGTCTGCTATCAAAACAAGCTGTTTTTAAAAGTCTGCTTGAATGGGTAAAATGCTTCATGAAAAGTAGGGTGGAGACACCTACCTGCTTTTAAAAATGTTCTACTTTCAGAGGGCCTATAAATGAAATATTTTACATTATATTTAGAATTTATATAAAAATTAGGCAGAAAGAAAGCAAATGTTAATATTTCTAAAGCAGGGGAGGATATTTCCAATGTAGTAAATTCATCAAAGCAAGAAAATGATTATCTAGCTAAAATACATTTTGCAGACTAATTCTACTTCCTTATACAAAGAGGCTTATAAAATGGAAAAAATCCTAATACACAGCTGCACAAAA

SEQ ID NO: 37 - protein, 677 aa, Homo sapiens
CCACACCAACTCTGTGATCCACAAAAATCTTGCATTTAATACAGCAACGACACCTATAATGGGGAAGGGGTGGGGGTGGGGAGGCCGCACATTTCACCATTTCCATCTAGATGAGGAGCAAACAAAGAGATAATTATAAACTGTTTCTCTTATTGTTGCACTCGCATTAGACATGTGCATCTCTCTCTCCCTCTCCCTCGCTCGCTGTCCTTTTTTTTTTTTTCTCCACAGAAAAGTAATTCTGTTGTGGAGATGGCACCAGGTGCACGGGGTGACCTCACACACACCAAATCGGGAGCTGACATCCATCACACTTTGAAATTTTGGATTTCATCATTTCCTGATCTTTCTAAAGGGATCACAGCACCTGGCCCTCACAGCTGTAGTTCATTTAGAAAGCAATTTAAAAACCGAGAAAAAAGCAAATGACATCTTGCTGCCTCAGCCTTGTCATTAAGTATAGCAGAATGGCCTTCATTTATGAGGCACATGGCTAAGAATTAATATCTTTCAGGGCTTTCTCGAGTAGAGATTACAAAAGGTTTGAAAGACCACTAAATAATTAGTGGTATGACTGAGGCAAGCAAAAAAAAGGGGGGGAAGAATCCCTCTTTTTCGTTCTACAGAAGAAAATCAGAAATTACACTGACTTTAGTGTGTCCTAAATGTTGGGAGGC

SEQ ID NO: 38 - protein, 1020 aa, Homo sapiens
GGTGGGAACTGAAACATCAGATGTTTATTAAATGCCATAGCGGTGGCGACTACTTTGCACAGTGAGCCCAGAAGTGTATGCTGTCACTTTAAAAAAAATTGAGCCGATGCCAGGCTAGTCATGGTAATGCTCCCATGGCATGATTAGATTCATGCCCAGGGTTGTATTTGCATATGATATTCAGGGCATGATTTTTTTATTGTTCTTAATCAGAGCCGAATGTCAACAAAATAAATGAAGTTGCGAGTTGAAGTGAAATTTTTATCACATCAGGGATGTGCTTTTTCTCCCATTTATCACAGCCCATATTGAGAGAGTGAAATTTTTTGAAAATGTGGTAATCAATGGAAGAGCTCCATATGGCAGGGATCAAAGGTGTTACATAGTGTGTGGTTCTGCTTTATTGCCAGCCAGTACTGTTAATTGGACAACAAGATCAGAGGCAATATTAAAATCCAATTAAATTGATATGAACAGATTGCCAAGTGATGTACACTAATGTATAATTGAGTATCAAGCGAATGCAAGTCCCCGTCTTCTGCTTCTACCTCCTGAATAAATGATGGCGCCATAGAGGACAGAAACAAGTTTGCACATTAGCTGCACAGCTCTGGGCTCTCATTTGTTACTTTCAGAGTTGATGACTTTTGGTTTTCCTCCTAGTCTGTCTTAAAGAGACAGGCCCATTCCCTGTCCCCCAAGCCCCCACCCTTTACCCCCCACCTGGGGTGGGTTTTCTTCCCCGAAATCATTTTCCCCTTTCGGGGCCTGGAAATGAAACCCATGTTTCATATGCTTCATTACATGTCTATTATATAGCAGGTCTTAAAGAGCAGTGCATTGATAATATATTGTGCTAGTTGTAAATGATCTGTCCATCTGGAGCGGCACGCTAACACATTTCTAATGCCGTTTCCCAGATATAAATTATAGCAGAATGTTTCTCAAGCTGAAAGGAAAGAGAAAGCAAGCAAGCAAAGCCCTGAATGAACACTGTCAGAATACCTCGGCACACAAAGG

SEQ ID NO: 39 - protein, 603 aa, Homo sapiens
CACCTCCCTTGTCTCCAAACTACACAACCTTTCAGTGGGTTTCCAGCCCAGGCGTGGACTGCACTGCTGAGGGCTGCGAGAATGACAGCCTCATATGTCTGAAAGCTGACACTTCAGCCTTGAAAAGAAATGGGGGAAAATAAGCTGTTGACTTCTTGGTTAAAGTATTTTCTTGTTCTACTCATGTTCTTATGTCACTGGGCTAAAAAAAGAGAGAGAGAAAAAGAGGGGGAGAGAGAGAGAGAGAAGAGAGAGATGACTTTCCTTGAATGATCTGTTTAACCTAAGCCAGAGGAAAAAAAAGAAAGTCATTAATTACTTATGTGAGCTATTGCTTCAGAAAGACAATAAACCTGCCCGGTCGCCATGGATATGACATATTTGCTCTGAAAACAACACAATAATTAGCAAAGGGGAAAGATACAAGGAGAATATGCAAACTCCTGAGTTTAAAGCCACAGTGCTCTTTTCTACTCGTAAGCCTCTGTTCTGTTTGCAATCCAAATCAAACAAATTTTAAAAATATAGCAAAGAGGGAAATAATAGGAATGGTTCCTCTCGCCTCTGAGCTGAGCAGCAACAACCACTCTACCTCCCTCCCTC

SEQ ID NO: 40 - protein, 1024 aa, Homo sapiens
CGTAACATGAATTTTATGATGGAATCATATGATTATATAGATACTGCTAGCTTGAGACAATAGGAACTGGAATGCTGTGGCCTGGAATCTTGTTCTTTATGTATTAATAACAGACTTCTGAGCACACATATTCACTTTCAGATTTTTAAGCAATTAGTTTGCAGATGTCACTAAATAAATGGCATTCATTCCTTAAGCAGGAACCATACCTGTTAACCATCTCAGCCTATTCTAGCTTTAAAGCTGGGCTTGATGTGCACAGCATGCTCAAAAACTGTACTCACAGTTCAAATGAGCTGGATTACAGACCATGACCACTGAGACCCTCACATGACAAAGCCTTTGTGTAATTAATATGCAGGGTAAAATGCTCCCTGGACTGCTGCTAAAGCGATTTAAATCATGCACATAAAAAATGTAATCACAAATTTAGCATGGTGGACAGAGTAGTCACACTGGGCTTGATTGCATAGAAGGTTCCAAGTGTGTTTTAAATGTCCTTTAAGATTGAGATTAAGACTTGTACTTACAAGATGCATATTAATCTAAAACTCAACATTTTTCAGTGTGGGATCACAGTAGGAGAACATTATGGGCAATAGAGGTTCATTCTAATCCCAGTAGGTAATTACACTTTGAAATAATATTCTTTAATTAAATCTTGTTTGCAGTTGATTGATTTAAACACTAAATCTAAAACCCTAAATTTGAGTTTTTATCAATTTTTGATGCTTATTGCACACAACTTGGGCTTTAATTGATGTTTCTGAAGTTTTAAAGCCCTTGTCCCCCATATCCTGGTTTAGAATTTAGTATAATTATCAACATCATTCTTTAATACTCTTGATGGCTTCTTCTGGAAACTCGGTAAGTTTGAGCACTTTCACAATTTTAATATATACCTGAAAGGTTTTTAATATATCACAATTCCAGTATTTACATACATGATTCTTCTATCACACCTTTAATAGACACATAATCTAATCCCTTCTCTGAAATACTGACAGAGGGTTCTATTTCCAAA

SEQ ID NO: 41 - protein, 556 aa, Homo sapiens
CGCACAGACACCCAATTTCCCATATACAGATAAATGCACACATGTATACGCGAAAGGTTAACTCGGCGGAGGACTCGCCCAAATAAGCACCGGGATTGCATTTAAAATAATAATAATAAATAAATAAATAAACTAGGAAGGAAAGCGGGGGGAGGGAAGCAGAAGTCGGGAAGAAAAGAGAAAAGCAGCAGGCTGATTACGAGGTGTCAAAACTGCCAGGAGCAAGAAGGTGATAGCAATCAGGGGTGAGAAGAGTGCGGCATTCGTGCGGGGCAACTAATTATCCGTCTCATTTGAGAAGAGCAGCATTTGAGGCAGCAGCGTTCGCCTGCTGAACGGTGACAGATTGGCGCGGAGGAGAGGGGAGGTGTTAAAACAATGGAGCCGGGCGCGCGAGCGCTGCTGCATGCTAATCAGCCCTCCCTCCGCCTGCCTGCCGCGCTCCCTCCTTCCTCCCGGCCTCCCTCCTCCGCGCTCCCTCCTCCCGCCTGCGGCGCTCCCTCCTTTCCAGCGGGCCCCGCGCCGCCGCCGCCACCCGCTTCCTGCTCCCTCGCTT

SEQ ID NO: 42 - protein, 1173 aa, Homo sapiens
GGGGGTCTTCCTAGGTTCAATTTCCCCTAGGAGATGTGACTTTGCTAGTGCGAAGATTTCTGTCCGGCATCTGACTCAGGTCCCCCAGACGGCAGCTAGGGCCCAATGCCTCAAGCTACAGGCAAAATCTGTTTGGTCAAGCGGATTGTAATACTTTGAGATATTAGCTTATACTAATTTAATAATCTCTTGCTAACAGTTCAAATAGAGAAATTATTAGTTTTAGCTCAACGAAAACGGTCTTTAGTTAGGCTTTATTATAATTATAAGCGGTTGTACTTTTTAAAAATGTTAATCTCAATATAGGCCTAATTAATGCTGCCTTGTTACTGACAAGTAGTTCATCAAATATCTGATTCAAAGATTTTCATAATGAGTATATTAATTAAACTATGAATAATCTAAAGGTGGTTATATTTAAACAATACCTCATTATAATGATTAAATACTGATTTCGAATATTATGTCTTAACAATTGTCACTTAGAAAACACAACCTTTCCTTATGTATGAGTCTGTAATGGCAAAATGCAATTTTGGGATTTTTTTCCCTTGTTCAAAAAATGTGAAACTCATTTTAAAACACTTCTGAAATAGGTTACACACAGCTTAATGATTATCAAAATGACTCTTTTCTGCAAAAAAAGACCCCAAAGTGCGCGTACAGCTGCAAACCCAAGAGGGTCAGCATCATTTCACTGTATTCTCTTCTTGATTACAAGCCGGGCCCATCAAACACAACATAATTACAGTAATTTCAGGTTTATTTATTCTAATGCAGTTTCCCCATCTCTCTGGTAATTATGAGCAATTTTTTCGCCCAGGGAATCTTTTTGCATTAACAAAAGAGATAACGCACTGAAAGCCAAATTTGCTGTGCATTGAGAAAAGGAAAAAAAAAAATCAAATAGGTGCGAGCTGCCATCTCTGCAATTCTCTGGTACCGGAGCCGGCAAATTGCTTGCAGGTGTATGGAGCAAGCTTGTCAATGGCCAGGCCTCCAAATTAGCAAATGCACAGCAGCAAAGTAATGAAGACAGACTTAGCAAAATTGCCAAACAACAGATATCCCTTTAATATCTTCTCTCACCCACACTAGCTCTAAAAAGGGGTAGGGGTAGGGAGAGAAGCAACAGTCCCCAGCCCCCTCCTCACTGGTCTTGGCTTTCAGGAG

SEQ ID NO: 43 - protein, 2166 aa, Homo sapiens
ATTCTTCCACTCATTGCTTCTTAATTAGTCTAGAACTCCAAAGATGAAAACATCATAGGACATTTAATAAGATGAAATGTTAAAAATGTACTACTTCTGATAATGGTATTCAATGTCAATAGTATTTAGTAATTTTTTTTTTACAATTTTCCTCATTTATTTTGGCATGTTTAGGAATAGGAAAAGAGGCTGAGTCAGAGACCTTCAGTACTTTTATTATTAAATCTACCTCATCTCCCTTTTTGTATCTCCCTACCAGAAAAGAAATGGCCTAAGAATTTCCACCTGCTTAGTTTGATATTTTAAGACATCTCATAACACTTTGATTTCACTAACATATTACCCAAAGCAACTAGTTTCCATCACCTTTACCCTCTTACGAATCCCCAAACTAAGCTTAAGAGGAAATCACAAGCCGTGTAAAAAAAAAAAATTAGAACTATTTCTTCCTTCCCCTATATGCTCTACTGGTGTCACTTAACTAAAACTCCTCAGTCTGCGACCTTGAGAAACCTAGAGGCTAAATAGGAGGAGTAGAGTATTGAAGGTCATCCTCTCGACCACCACCCAAAAAGAAGAGCATATATTCATCCTAACAGGTATGTGTTTTCATAATTATGGCAGATGGTGATTGAAGCAAAGGCAATTCAAAAAGGGGGGCACGTGAAAGCAATAATTTTGAATGTTTGACATTTGTTTTGAAACTACCTTACTACCCCGTACCCTTTACCATCTGTCTGTTATCCCTCCCAACACCCACCTCTGTCTTCCCACAGGGCTCCATTGTGTGCAGTTCCTGTTTCTCAGGGGCGGAGCTGTGGGAGGCAGCCATGGGTGCCATAATAGGCACCTGCGGCCAGCACAATGGGCTGTGGGTGCTTGTGGGAGAGACAGATTGATGTATTGTGCATGGGGGAGGAGGGCTGTCACTTGAATCCATGTGAACCCAGGCTTTAGGGGCAAGGGAGATTGACAGCTTTTGTAGGTTGCATTTCTTTTTCAAAGCTTGGCTTTAATAGACAGTAAGTTTGGGGCCCCAGGCTTTCACTCCCATAATTCTAACAGGGCAATCACGAGCATTCAGCATTTCTTTTTACCCCCCTTGTTACGCATTAAATGATTTCAGTAAAGGAATGTGCAGCATTAATTAGAATTTGTTAGCAGATACCAAGGGGAAAAGTTTCTTCACAACAACTATAGGAGGTGTCATTTGTACAAAGACTTTTTTGTTTTCTTTCCCCATTACATTATCACTGCAATATGTAAGGTAGTGATTCTTTTCATTTAAATTAAGTGGAAAGCTACTAAATCTTGTTTTATTCTCCAAAAAGAATAAGGTCCTTAACACTTATCTTTTAACTTCTTTCATTTCCTAAGGTTGGTGTTTACTTTTGCTTTCAGTCTGACCCATTTACTGGTCTGTGTGGTTGTGTATCCAGTTTTGTGTACCATTTAGCTCTTACAATTACAAGCAACCCACTACTGATATATAAGGATTGTTTCCAGGTGAAAATAGCTAGCAATAATACTGGAAATCATTGATACTGGAGCCCATTTTCGTAATGGTATACTGAGAAACGCTAAAAATGAGATTGCTATAGATTTGTGTCCTAACTTATTTTCTAACACTATTTTTCCCTACTTGATATTTAACCTTAGCCAAGACACCAAACTTATGGAAGAATGAGGCAGTGGCAAAGAAATATTTTTTTTCCCGCAGAAAACTTACTCCTAAACCATGTCAGTTTTTTTTTTAAACATCAAAAGTTCTCCCTCACACACATACACAGATAGCATCATTTCCTTAGAGCAAGTAAGAAAATGGTCTTTTTGTTTAGTATCTGTTTCCTATTATTTTAAAAATAATCCGGACATTTTAGAATTATATAGGAAGAAAACTAATGTCAGATAGGATATCTTATAAACACACTCTCTGGCATCCTGAGAACTGATAAAACATTACTAAAATTTCTGGTGTGATTTTTTTCTAACATCTCTCATATAAAATCATTTTCTCAGTAGAAGGAGTTGGAGGCTAATTGAATTAGAATTTCCCCTACTCAATTGTTTTATTTAAATGTGTTAAGGACAACAGTGAAAAATATTGTCTACCATTATTTCTCAGAAAGAACATATTCTCACACAGTTGTCCGGCTCTGTCTATAA

SEQ ID NO: 44 - protein, 1876 aa, Homo sapiens
GTGACAGAAAAAAAAGAAACAGTTTTATAACAATAATGTAAATACCAGGTCTAAATTTATTTTGAGGTTTGTTAAATGGGGTGGGGGGAGCACAATTCCCAAAAGCGAAATTTCAGATTGTAATGAATAATCACATGCCACTAAATATTTGTGCTGGTTTTGAGACAGCGTGCCCCATAAAACTCCAAGATGTGGTCGAATGTATTAATGTTGCTCTAGACAATTCAGGTTTCTCTATGTATTTAACCTCCACCCCTGCCATGGCCTTGTTAATTTTGATTTCTAAGTGACTTGGGTACGACTACAAAAACTAAACATATGTTTAAATATGTACATACAGGCATTCCTTTTTTGCCCTTTCTAACTGCAGATTATGACGTGAGCTATGATTATCCATCAAAGTAATTTCCTCTACCCACTCCCTCTCTCATCCTCCCACCCTCCACATTTGAACATGCTTCTCTTTTCCTTGGGGCTCCTGTTCAGCTTTCTGCAGCACAGATCCCTGCTGCCTCGGCCGCCTGGAAAATAGCCTACAGTGCAGCTCAGTATGGCAGCACATCCCCACGGCCTGGGTGTTTTTCCAGACGGTTTTAGAATGATTCGGTATCGCATGAGTTAAAAAAAATTCCCCCTGGAAAAGCTAATTATTGCATGCAGATACTTCTTTGTGTGATCAAGGAGGGGACAATTTAATAGGCTCTGTAATACAACCAAGAACAAAATTGCTTTAAAGGAAGTCTCTTGTTGAGTGACAACTCTGTTGCCTGAGCCAATTAGGTCCCAATAAAGAGTGTTGAATTGGCTCCTGCTTTCTCATTAATTATGTTCTGTCACAGACATGGGGCTTGATTTAGCAATTTTGTATTACATTAAGATACTGAAAGGCCGGGAACAAATGGCTCACTCTGATAATAGGCATTCTCTACACGGTGTGACATTTACTATCCAGCTGTCCGTAAGGCAGCCTAGCACTTCAGTTCAGGGGTTTATTTGTCATTGCTTCAAAGGGACACTCAGCTTTTCACAAAAAAAGAAACAGAGAGGCTAATAGATAGGACAAAATGTACTGCTGATATGCTTTATTAGAGATAGGATGCTAGGGTTTTGCTAACAAGCTCATCCGTTGGGACTCAGCCGACTTTGCTGCCAATCATCCTCTACACAAAGGCGCACTAGTTAACAAGGAGAAATGAATTACAGACACTTATTCTGCCGGTGGGATCACAAATACACCAATCTGTGAAAGAGGCACAAACTCCAGAGACAAACTACATATTTGTCAATAACCTCCTAGAAAGAACCCTAGTAATTCTTTGAAGACCTTTGATTTAGCTTCCCTCTAAAATACATGTATAGGAAATGTTTTAGTTACCATGACATTCTTTCTTTGTTATTTGTACAAATTTTCATCACATTAAAAACAGAAAACTGAGGAGGTCTGCAAATGTTTTAGTAGGTATCTATACACTACTTTTCATATCCCACCACGGGGAGCTGCTGCTTTGGTTATTTCATTAAGAACAACAGAAAATTAAATCTTTAAACTTTAGGTTTGAGCTGTAATCCACCAATGCCACAGGAAATAATCTATAACTCTGAATTTATCGTGTATACCAATTAAGAGAGCAAGGTTAGGGACCGAATGAAAACCAAGTCTGTCTGCTTAAATAATTAGATGACTTTTAAATCATAAATATGTGTGTTTGTGTATATGTATATGAATTTACAATACAGAAACATGAACCTAAATCAATGTCTCTATATATTAAATATGGTGAAATATTTTATACATTGTATTTATGAAACTAAGCCAAATCTCTGACAGTAGCATTGATCAACATATTTGCCATTTATATTATTTAAACATTCTCCT

SEQ ID NO: 45 - protein, 838 aa, Homo sapiens
ACAGTGCCCGCTGTACAAAGTAAGAAATTAATAATGGTCACGTTTGTGATTATTATTTAAACACCAAGCAGATATTAAATATTAGGGCTCAGAGAGGGCATGCGACCCGCCTGAATTCACTCAGCTGCAGAGCTGGAAAGAGAACTCAGGCCTTTTTCCCCACGCTGGAAGGGGTAGCTGGGGCGGAGAGGTGGGGGGAGCGGTGAAGAAACCCCAAGCGGCCCAAGCTGTGGGTCTGGGTTGGGAGACTCGCAGGTGTGGGGCGGGGAGGTAAGGTGACCCTTGCTCAGCGACCGCGCCCGCAAGAAACGCATTCCCAGGCCTCCCGCCCGGGGTCTGCAGGTGACGGGCTGGGGGGAGCACGGGAACTAGCTAGACCAGTTTGTCGTCTCCATGGCGACCGCCCGCGCGGCGCCAGCCTGACAGTCCGTCCGGGTTTTATGAATGGGTGACGTCACAGGCCTGGCGTCTAACGGTCTGAGCCGCTGGTTCAGACGCTGACACAGACCGGCCCGGGAAGGGAGGGGGGAGACTGTAGCTCCGCAGCTGCCGCGCCGTGGGAGGGAGACCCTGCTCTGAGGTCTTTGAGAAGAAAATTTAAAAAGCAGCCAAAAATGGGAAAAAACATTAAAAAATCACGAACTGTTGCAGGTTCAGGAAATTTTTGCAAGGAGCTGCAAATTCAAGGTGGAATCGAATGCAGCCTCACTCCACTGCGCTCTATCTAGTTCACTTCCCAGCCACCCAGCCCCAAACTTACTAGACTTTCCCGAATTAATTGCTCCCACCCGGGAGGGATCTGGGTAGGCCCTCCGGGTCTCAGGAACACGAACAGCAA

SEQ ID NO: 46 - protein, 1754 aa, Homo sapiens
TAGGTATCCCCCAGCCCCTACCTTTATTAGGAGGCCCGGGTTTCCCCCATTAAACTTATATTCATTCATTCATTCATTCATTCATTCGTTCATTCATTCATACCACGACTATTCAGTGAGCACCTACCATGTGCCAGACACAGTATTAGACTCTCAAAAACGCGGCATAAATGGAAACTAGGCCCTGAAGCCAGAGCCTCAGGACTGGCTCCCGGGAATGTTTGAAGATCATCGCGTATCTTGGAATTGCCAGGCTTCCTGCTCCACAGATTCCAGCGCTGGGCAAATGGACACAAGGAAACATAACTTCTGCATAACTTTTACTACTTCTTTCCTTTTTTCTTTTTTCAAGTAGCAAAGGACCATTAATTAGAAGAATAATTACTGCTACCCTATATTATCCCAACCTGTTCAATTTCTATCTGCCGCAGACAATGCTAATAATGGCAATTATTGCTTCTATAAACATCCCGAGGCAGCACTCTTCCCCCCGCAGTGTGTGTGTGTGTGTTTAAAGAATATATATAAAAAGTTCCCCGGCTCATTTGCATAGCTTCATCTTTACCTTTTCCCATTCAGCCCTTGCAAAAGCATATCTATTCAAAGCCCTTGCAAAAAGCATATCTATTCAAAGGGCATTTAGTCCATTTCTTTCTTGGCCGGTAAACCTATTCATCAATTGTTCTGCCTTGTAGATCGCATTCTAATGCTAATCTAGCGTGTTAAATATCTTTTTGTTCCCCTTTCACCGTTTTGTCATTCAGTTTATCCAGTTTTGGTCACCCATTTTATTTATTTATGCGCCTGCTCCTATTCAGGGGCTCATGTATTTTTTATTATGTTGTTTCACTGTCACGCAGTGTCAACTTAGTCTATTCAATGGGGGCTACTTGAAGGCCGGAGGGACAAAGCGTGTACACATTGCACCGCTATTCATTCCGGCCAGCTGGATCGGCTGAAAAAAAAACCTTGTGAAAAGAAACGCCTCACAATGGACACAGAAGAAGTGCACAATGCTAACAGTTTTCCAAATACCACTGATTGGTTTCTTCACAATGAGGAGAAAGCCGCCGCTTTTTCTTAGCTCCACTTCAACAAACAACACTCTCACAAAACCTCCCAACCCTGCGTTTTGTTCTCGGACAAAACCTCCTCGACTGTCTAAACGCTCCCACTGAAGGACAAAAAAAAAAAAAAGGATAAAAAAAGCTCTTTTCACCATTTCCCTTTTTTTCCCCCCTGCAAGAGAGAAAAAAGAAAAGGGGGGGAGGAATTGTCAGTGCATTAATAATATCAGTCTTTTAAAAGAAGAGGGCTGACCTTTGAGATGCACTGGGCTGAGGGAGAAAGAAAGGAGGAGAGATTAATAAAGTTTGGACGGCTCCCTCGGCCTCCGCTGGGCCGCGGGCGCAAGAAAGACGCGGACCCTCGAGGCGGACGAGTTGCGGGAACTTCGCTTGCCTGGAGGACACGGCGGCCCAGGCGGCCGGGAGCGCCGGCGCCGAGCCGCGCTCTGATTGGCTGGCGCGACCGTCCCTATCTGCTCCGGGGAGAGTGGAATCTTCTCTCCATCTTCTGCGCCCCGAGCCTGGGGTGAGAGGGAGATCCGCGGTGCTTTCTCCTATCTTCTTGGGGGAGGGGGAGGAGGAAATTGTCAAGGGAAGTAACAATCGCGGCCAGCAACCCTGCTCTCCCAAAGCCACCCCCTCGCGCGACAGCGTCCCCAGCACCAGTTCTTACTGCTTACACAGCGC

SEQ ID NO: 47 - protein, 1575 aa, Homo sapiens
AGCTGTTAAAACACCCAGCAACTCTGAGGAGAAAAAGCCCAAAGTTCTTGTTCGGTTTCGCCTGGCACTGGAAATGCCGTCAAACCAGAGCGCGAAACGGTCTGGTGGAGTATTTCTGGTATCAGCATCTTGCAATTATTTGCTCAAAGGCAAGTGAGTGTTTCTCCCAGGACCAAAACATAAAGTTTGTTTTGGATAAATGCGCCTAAATACCCCATTAAAGCTGGCGCCCTGAAAAGAGTTCTGCTCCCCAAATTGATTTAAAGTATTAAAGCAGGATTTAAAGGTTATTCACACTCCAGGCAGTTTATTGGCACCGAAGCACATTCAGAGTTTCTATACAGCTCACTATATTTAACAAATTATTTGAGTTATTATGTAATCAGGCTGAGAAGTCGCACTTGTAAACTCTGCTTTAATTGTGCAGTTAAACATTTTTACAAAACTCCTATATTTGCATTTGTTAAGATTTCAGATTAGACCATTTTGTTAATTGCGCCATAGTGCTCCATTTTCCCCGGTGCGTCTTTGCAAAGCTTTCTTTCCCCTTTCAATAGCGCAGCGTTTACGCCCTGGGCTACCTCCAAGCCCGGAGCTCAAAATGCTCAATTTATTTATTCTTAATTTTGTGGCGATCATTCATGGAAGCAAAAAAGGCTACAGTGTCCTTTTTAAGAAAAGAAAAGCTAATTCTTGAAGTGACCTTGGCAGTCTGGTGCGTGCCCCATCCGAACAGAGAGGGCGGCTTGTGTCAACAAGCCCCCATCTACCAGACTCACCCTTGTCTTTATTCCAACTAATTTTTCGTTTAAGACTTTTCTTAGACTTGTCTCTTATCTATCAGATTAAAAGAGCAGCTTGTAACAAATCAGTCTGCTCGATTTACAAGAGCATTAAAGGGACACAAAGGCAGCAAGCTGCAGTTAGTACCTGGGTCTGTTAGACGGTGCGGTGCCTGCAGCTGATTTGATGGGTTGGAAATGCGCACGAAACAAAATACTTGAATCCTGAAAAAGACCCTTTGTAAGTTTCTTTAGAAATCAAGCAATTCTGCATGACAAAGAACAATTAATAAGCCGTCTTTTCACAAACCAGCAGCTGGTTTCCCCGTCAAGGAAAGTTGGAAAAAATTCAGGCTGAATGCGCGCAGAAGCTCTTTGCGCACAGACATCTCTCCAAGGTGACCCATTTGGCACAGCTGAAATAAATAACCCCGCTCATGCCCAGAGAGCGGGGGAACTGTCAGAAACATTTACGCTAGAATATCTTGAAATTGCAAATCCTTTTATGGGGGAGGACGCTGCCGATGTGGGTTAAATGGACAATGACGCTGGTTAAGTTGGAGGGTCCTTTGGAGACGGACACGTGGCTTCTCAATGAAAGCTGCTCCGGGCTCGCGTGGCCGCCTTCGCCCTGCACACACTTCTCCTCCCAAATACTTGAAAATAGACAGAGAAAAACAAGCAACTCACAAACTCAGCCCTTGGCCCTGGCGGGGAAACAGAATTTCTTTGCACTTTTTCAGAGATATAGTTTTTTTTTTTTTTTCTTTTTAAAGGACCTGTTTGGCCTCTC

SEQ ID NO: 48 - protein, 1414 aa, Homo sapiens
ATGCAGGTGTAAGCACTCAAGTTTGATTTCCTGAAGTAGAGCTTTTGTGTATGTGTGGGACTTAAAAAAATCTGTTGGCATGCAGTCTCCCAAGTCTCCATGTTTATCTGTTTGTGATGTCATATGCAAAAGCAACAAATCAGTGGATGCATCTACTAAAGCAGATTTTAAAAAAAATCACCCAAGCTTCTCCTGAACTATAATTCTTGCCTAGTAAAACATACATATATGAAAAATGTATAAAAATCAAATCAAAAATTAAGACAGTAATAAACACTTTAGACAGATTTCACATACCTAAGTCAAATGGTAGTTCTAACACAGGCATTTATATGGGCCAATTATATAAAGCCATTTTGAAAGGCTGCTTTTCACCATGTTTCTTCAATTCTTCAGAGTCTGCGGTGATGACCAACATCAGATACTATTAAGGAGTCTTCAAGCGTGTAAAATAATATGATTTCACAATGATTACATATTCACTCTACAGCTGGCTGAGTTTTTACATCTCCATTTGTCATTGACGATTGTGTCCAATTAAATGATTAGCTTTTAAAAACTGCTGCACATTATGAGTGTGAACTTGTGTTCCATTGCACTGAGTGATGCAGAAACAAACTCATTACAGCATGTAATTCACCCATATTAAATAACAAACAGATGGCTGCTGTAAATGAGAGCTCCTTTTTCTCTTCAAAAGTGCCAGGAAAAAGGTGTTTTTATTTATCTTTGTTTCCAGCTTCTTTCTGTTTTCTTGACAAGTGGGCAGCTGGTTGCTGAGGTTTTCAATTGGTGCAGAAGAATGAAAAGCCTGTTTCCATTAATTTCCCCATAAAATAAGTCTTTGAATCATTTCTGTTATAAATGCAAGTGCAGTAGCAAGCTGCTGCTTGATTAATTCACTTATTATGAAGATTTCATCTTTTATAAGAGGGCCTGCAGGTAATTTATCTTGTTTAGTAAGATTAGAAAAATGTAATTATCTTGATACCTTTGGACCCCTCTCATTTTAATTGTGTTCCCATAAATTTCAAACATAAAGATGGGAATTTTTTGTGCACAAATGTTCCAACATGTGGTCGAAAAATGTGCTTTAAGCCCTGCACAAAAATGTATCAAGTAAAATACATTAGGACTGTACTAATGCAGGAATGCATACAAATAAAGCTAGCACAGAATTATAGTCGTGTGTACAAACAAATATTTGAATTTCTGGTTCCCTAGTCACCAAACAGCTGGGGTGAGGTAAAGGAATTTGGGATTTGTTAGACTTTTTTTATATGTCCCTGGGGAAATGAAATCTGTCTTATGTATACTAATAAAATTAAAATTGTGTTTGTCTTCAAATCTTCCAAACTCAAGTCAATTTCTACTGGGTATATATTTCATGGACTCTCTTCCCATCACTTCCATT

SEQ ID NO: 49 - protein, 1426 aa, Homo sapiens
CACACCAAATCACCTGACTGATTCCTTCATCAAAAGCTCCTCTTGGCAGTTAGCAGTACACACCTAACATTAGCCAAACAGGTTATCTACCATCAACACGGAGAAATAAGAAACTTTGTATTGCCATTTAAAGAAGTTGCTTTCTAAAACTAGACATGAATAAGGGAGAGAAGAGGAAGTATTAAACCCCTAAACTAATTAACGAAATAAGGGAGGGGGGATGCAGGAAAACAATGATAATTAGTATGTACCCTTGGTTAACCAAATCCACACATACATTCATTCTGTATATGCACAAACATCAGCAGCATCATAAACCGTCTCAAGTTCTAGCCATTATTCAGTTCGACATCTGCACATGTTTATGCGTCTCTCCAAACAACCTCTTGAACACCCTGCTGGAGCTGTCATTTTTTTCTTCTCCCTATCTGGCAGATGGCAAGTCAACAATCGGCATCAACAGCAGCCGAATATCTCCCCCTCCATCCTACCCCCCTAAACAGACACAATAATAACTTCTTTGTGCTTCCCTACAATGCAGCTGCTTAAACCATTTCGCTACAAGGCTGCTTTGCCTTAATAAAAAAAAAAAAAAAAAAAAAAAAAAAATCCCTTCTGTCAAGTCTAAAAAGCAGCATAATGTTAAGCAAGCTAAAGCCACAGCACAGCTGCAAACGGGCAGACACATTGACAGCTCCTCCCTTAACAAAGCCCTGTGAATTGAAGGGGGTTCATCTGAGGCTCACACAGTAATTAGTATAAAAAAGTCCGACAGCCTCTATTATGCTAAGGGAAAAAAAAACTGGACAGAACTGGGCTGCTGTTTTGCGTCAAGAGTTCTGCTGCAGAGTAGATAAATCATGTTGGGTTTTTTCCTCTCTTTTTAAAGACAGTAATAAGGAGGATGAGAGAAGCTAATTTGAAAACTTGGACACAGTAATTGTACCATATGGTGAGCATTTATCCTTTCTGAAATGCACGCTAACAGTCACTTACATGCACACTGCTTTGTTTTACAGTTGTTATTCTCTCTACCATATTCATAAAATGGATTTGAATATCTGATACTCAAGATAAGTTGTGTGTAATTAGCAAGAGAACTGCCTAGGTTTAATTTATTGGCCTTGCACTGCAATCTAGTAAAATGCAAAACAAAATTAAACAATGTGTCCACTTTGTACAGATATTTTTTCTTTAACTCAACAAAACACTAATGAATACAAGTTCATTGGAGTGTTTCTAAGTTAAGGCACAGTGTATTTTGAAAATTCCAACAGAATAAACTATAGCTGTTGATAAGATTTCTGATATGTCACCATAAGAATAATTTTTCAGAAAGATCACCTGGTTTAATTTTGTATTTCACTGAAGCAGATGTAACTCTTCCTCATATACATCAGTAAACCTAGATGCAAGAGAAATTTCC

SEQ ID NO: 50 - protein, 1069 aa, Homo sapiens
AGTTTTGGCTGTGACTTTAGCCATTGCTTTGTTTTATTGTAATCAGATACATTGGCATGAAACTACTTGTAACAGATTCCAAAAGTATATGCTGGGCTTTTTATTGGCATATCAAACAGGGAAGCATTCAGGCCATACATTAGCAAGCAGCCAAGTAATTAATAATAACACACGTGAAAGAAAATGAATATTTTGGTTGAGAATCAGAATGAGAAGTAAGACAAAGGCCTGGGATTCGTGTCCTTGCCCTCAGCAGCAGCAAAAATAATGTTATGAATAGCATTTAACTTGAATTTGCAGCAAACTGCTGCTTTTATCATAAACAATTGCCAGATGGTATACATTATCTTTCTTTTTTCTCCTTTCACAAAAGCAGCATTAATTGCAGAGCAGCCCAGGGCTCCACTCAGCTCATCAGTGTGATAACACTTCATGACCCTGATTAGCCGTCAGTCTACTCAATTAAAAAGATCATTTAGACATTCACCCAATCATTTGCCTATCGAGCCACCTGGGCCTCAACCAGGGGCTCCATTTTTAACATTCTCCTGCCCTCTCTCATCTTGCCTAGCTTTTTTACATATCTCCAAAAGACGTAATTGAATTAAATAAAGCGTCTCAGGGGCAGCTGCAACATCTGCTGTTTGTGGTATGTCAAGCCTTCAGCATTAAAAACAGTTACATATGCTCTAAATTAGCAGGTCGCAGAGATGAAACAGTCGATGATAGTGTTTTTGTGCCAGCGTGAGAAGCAGCTCACAGCTGTGTGCAATTTACAATTAAAGGCTTTATCAGAGCTCAATTGTACTAGTGAATCAAGTGGTGAGAGGTCAGTTAGTGAATTAGACCAATTAGAGCTTGTACAGTTAAATTATCTGTCTTATTACCTACTGATAAACAGCCTTGTCATATCTTTGCTGGAATGATGAAGCTGAATGAGTTTTATGAAGTGATAATACAAGTTCACTGTAGTGGAACTTAGTGATATGTGAATTCAAAATCTATAGCAACAAAATGGTTTTATATAACCTTTTAAAATAGCTATATAACAGGGAACTTTGAATTGGTT

SEQ ID NO: 51 - protein, 1730 aa, Homo sapiens
ATGATCACATCAGTGCCCTTTAAAGTACTGTTCTCATTAATATGAACCATTGAATACTTCCCATTTGTCTAAAGGATGGAAGGCTTAGTCACCTTGAAAAGATGCTGCCTTTTTTTCTTCGTAAGCCTTCAAATACTTTAAGAAAAAAGCCAGTAAAATATCAGTTAAATGTATTTATGGCTTTAAAAATATTGTAACAGTGTCTGAATCAAACTTTAGTAAAATCTCTTTGGGTTATATCTGAGAAGCTTTTATTGAAGACTTTGAACAAAATTGTGTTTTTGACAGTTTTAAATTATAGGCTAACTAGCCTGGGAAAAAAGGATAGTGTCTCTCTGTTCTTTCATAGGAAATGTTGAATCAGACCCCTACTGGGAAAAGAAATTTAATGCATATCTCACTATCTTACTGTCCATGAATATAATAGAAATGAATTCAAAATGCAGTTTTATTTTTGCAAATGGGATGAGTCGATAGATGCACCTCATATTTTTGAACACCTAGGGTTCAACAAATTTACTGGTGGTGCTCTTGCATTTTAACAAAATTTATTCTTCAGTAGAAGGGGGCAGAGAACACTAGATTCTTATTCAAGCATTCTATCGAGCTCTGCATTCATGGCTGTGTCTAAAGGGCATGTCAGCCTTTGATTCTCTCTGAGAGGTAATTATCCTTTTCCTGTCACGGAACAACAAATGATAGCTAACTACAGAGGCACATTTGCAGTAGTCACATTCATCAACTGCAGAAAAAAAAATTCAATTTAATTGTGCAACACAGCTGCACATGGGCTTTTGAGCATTTCTGTTGTTCTCCCTGTCTCGCTATTCCTCCCTCCAGATCTATTTTTTAAACTTTTTTTCTGGTTATTTTTTCCCCTTTTTGTCTCTTCTTCCATTTTTACTCTCTGTACTTTCTTGTTAAAGTAATTTTCCTTTGTGGCTCTCATTCTTTTTCCCCCATTGAAGGCTATGAATGTAGAAAATTATCACAATTACTCATATAATTGAGCCTCTTTGTAGCAAGTGCAACTCCAGTAGCCTTTCTCCATCATGAAAATGGTTTCATTATAGGGTTTTTCATATTCTCTGACACCATCTACACAGAGGAACAGGCGTGCAGATGAGATGTGCTAGGAACAGGCTAGATCAGTAAGGTCACAGTAGGAATAATTAGCTCTGCTATGGAAAGAGCATCTAGGCCTTTTACTGCTACATAAATGTACTGTCCATGGCTTTTAGTCACAAAAAAAACTTACTAACAAATGGAGCTCCCGCCTACTACTTTGAAAAAAAGATTTGTATCAACACTACAATTTTCCATCATTAAGACTAATAACACAGAGCCTAGTATACATCAAGGGGAATAAAAAGAAAAATCTCACATTCAAGTGGCGGCTGGGTGCTGACCTTTGTTCCCTTTTTTTGTGTACGACTTAACTCTTTACAAAAAAGAGCCACACGCCACACCAACATGCAGGTGAACTCCAGCTAGTACTAGCAAAGCATAGCATTCAGTTGGAAAATTTGATAAATCTCCATGCAGGATAATGCATTTCATTACATATTCACTACATTAATTCTAGCTACATTAAAAAAAAAAGAAGAAGAAGAAGAAGAGTAGAATTGAAAGTGACATTGGATTTTAGCTATCTGGATACAAAGGTCAGTTTTCACAGAGTATGAATTTGCATGTACAAGCTTTTTTGAAAACCAGATCAGTCAGTCCCA

SEQ ID NO: 52 - protein, 1296 aa, Homo sapiens
TTGAGCAGAAAAATTTGGAAAATTGTTTTTTCCTGTAAGAATATATTTTTATTTTCATTGTTAATTGAAAAGATTAAAGTTTTTCATCAGCAATAAAATTTTCATGGCTACCTTATGAATATTTTAGCTACCATATCTAATTTTAATTTCTAAATAAATTAATAACAATTATAATGAGAAAAGCTTCCAATTTTATTTTTACATTTTAATGAATTATTTGTGTTCTATATGTAAACTGTCTCAGCATGAAATCAATTTTCTGCCTTGATTCATTCCAAATCTGAGATTTCTATCACATTAATATTGTAATTAGAAACATTAATAGAGACGGCAACTTAAAAAGCATACTTTGCTTCTTGGCAATTTAGCATATTTCTCTGAGTGCATAGGACTTCAAGAACTTTCAGTCCACTAATAAATTTATTAACTCAAACTTAAAAGAAGTGAAAAGTCTCTTTCTTTCTCTCTCCCCATGGCCAGTCTGCTAAAATAGATTATTCATGCTTATTTGATTCAGGTAGGCTTTTGCAAGCTTCCCTACTAGGCCTGGGAATGTGGTACATTGAGGCCTTTTCAGAGGCTTCTGACATAGACCAAGCTTTTATTGCATGGTGTTTTATTATAGCCAAATCCTAGTCTCCACCCAGTTTGTAGGCACTCTGCTTATTCTTTTGAATCAGGAAAGGTTATCACCTACCTTAATCCATGCTGCTGCATGGATTAAGGACACCAGTGTGCCCCAGGATTCTCAAAGAGGATCCTGGAAACTTCTGGTTTTTTCTTTTTTGCTGTCTTTACTAAATTCTATTGGGCCTGAGGGGGATTTGCATCTGAAATGGGCAACCTGGTGTTTTTCTCAATGAAGACATCAGATCAAAGTTCAGTTAGTCAAGGCCTTTCTAAAACATTAAGGGGGCTTGGACTTACACAATAAAAAGATGAGCTCTAGCAGAGATTGCAATAAAAACATTCTGAACTATAATCCGGATAAAGAATAGATTATAGGCCAAAGAACAGACCTTGTTTAAATTGCTTTAGACTAATAACTTTACATTTTTTAAGTTTGTACCCTATTTTTAAGAAACATTTTAATATTATATATTTTATTTATCAATAGTTTCATGATAAATGGATAAATTATGTTTTGGGAACAAGAATTCTGTACATATTGGATTGAAAAGATTAGATTGAAGCAAACTGATAGCATATCTTATTAATGAAAGTAAGTAGTACCTTATGGAGGGATGAACGGTCATTTCATTTTAAAAAATAAATGTCAAACCCACAGACTCTGAA

SEQ ID NO: 53 - protein, 1848 aa, Homo sapiens
AATCCACTGTGAACAATCTGCTAAGTTAAAGTCTTATTCCCATATGTCAGAAATTAACTTGTCTGCTTCAAGCATTTATCCAATAGGAATCCACATCCAATGTATTAAAACTTAATTTAAACTTAATTAGTTTGTGAGCAGTGTTCAATAAATCTTCTCCAAGTCTTTCTATAGTGAAATCTCTGTAGCCAGATGTTGATTGTGTACACATTGTTTTGTGTTGCTTGCATAAACATTATAATCACATATAGACAACAGCAGAGCTACAATATTTAGAAAACATTTTTCACACCTCCTTATTAAGCAAGACTATGAAAATTATGACTCATCACTGCACCATTGTTTTTGCCTGTTTTCTCGTGCTGGTTGAACAGTCATAGGCAGCTGGTATTAATACAATAGGTAGTGCTTAGGGAATTAATGGGTGATGTGTAATACACCACAAAGGTATCTGTCATGCGGAACAATAGGCGCAATGATATAAGATGTATGTATTTGAAAATTTGCTCAAATGTGAGTTTTCCAGCATAAAGACATACCTTGACTGTGCTGCAAAATTAGTTTTTAACAATTGTAAGAAGTCTGCCAAAAAAAATCTGCTTTTATTTTATTTGTGATCCTGAGAGCATTTAAGCTACTAGGAGCAGGGATATACGTGCTCCTGTTCTCTCTGCTCCTATCAAAACAACACTAGAGCGCTTATGCTCCAGGGAGATTTGTATAGAATCTGACGCTTGTATCAGCTCTGAAAAAAACAACAAAATTACAGTCTGAGGTGATGCAAATGATATCCTTGGTGCATCTTCCCCATGCTCCTGCGAGGCTCTTGACAGCTGATGGTTGGATTAAACAAAAAGACCAGTAACTTATGACTATTAGCTCAAAGCAATCATCTCTCATTATTTCAATTACATGGGTAAATGCATGCAATCATGTATCAAATCACTTTTCCCTTTTGAAGAGGTTCTTTTCAGAGTAGGATTTCTGCCAGAAAAAATGTGCAAATATTTACACTGGTTTTTCATCCAACTGCACCTTTGTTTGGCAAAACCACCCTATGGCTACAATTCTGAGTGATATTTTGAAAAAGGGGGAAAAAAACAAAAAAGGGAATTGGAAATAGTATGCGGTTTTGGTGACTCATTAGCAGTCTGTAAAGGAGGCATCTTCCGTTACTTACTGCTACCTGACTTGTCAGTATGAATGTGGCTCCTATTCCCTAAATCACACTACCTGTGAATAGAGCTCCGCTGGCCAATTCAAGGCTCTTTAGGCAACTATGATTGATGACTCAGTGACTAGGAGAAAATTGCCTTCAATGAATTATTCATCAAGCTATCTCTTTGCTGTTAAAGTAGCTGACAGGAAAGTTCTGACACTGCCTAAGCACAATCCACTTACAAATCAGTTACAAGGAAATATTAAAAATAGCTCGGTTACAGCATACCAGCACAGTATCAAGTTGGGGCTTTTTTCTGTCTACATTGAGCATCACGGAGAACTTGAGCAGCTCTTCCCATTTAGCCATTGTGCTAATGGCAGTAAAGGCAGTGATTAGATAGAAAGCAATGTGATTTGTATTGGCTTTGAAACAATACACTGTTTTTAATAACACAAATCTCTAAATTTAAGGTAGACAGTTAATCAAGCAAATGGTAATATTTAAGCATCTTCCAAGAAAATAAATAAATACAGTTTGTGGAGGTTAATTTATCTTTGCCTTCCTGTTATTGAATTATTATGAACCTAGGAAAGGATCAAGCCCATATCTACTTAGGCATGTTGTATATTAATTTTTAATATGGAAATGATCAACATATAGCCGGGAAAACATGGCAAAAACATGGT

SEQ ID NO: 54 - protein, 776 aa, Homo sapiens
AACAAAGCCTCCATAATTTGACATAATTATGGGTTACCAAACTTTTGAAAAATCTTAGAAATTTGTCTTGCCAATTTGGCTTTACTGCAATCAGTTTCTTTTATTTGAGGTACAATGTACTTAAAACTCACACATTAAAAGGATGTAAAACAGGCAAAGGAAGATAGCATTTAACTGCTATTCATCTAAAATATATATTCCTATGTACAGAGAGCCTGGACAGTGTCAAATGAAACAAGCAATTAGTCTCTTTCTAACAGTAAGCAGTTCAAACTGTAACATCATGCCAGCCGTGATTAAGAATGATACAGCACATCATCATTGTCAACACTATTCAGCCAATGTAAACGTTAGTTAGAAATGCACTTGTCAGAGAAAAATGTGCCTTTGATTTCTATTACGCTTTCCCAGTAATTGCTGTCATCAGTGGCAGGTTATTATTACAGTTGAATAGAGTTTCAGTAATTACTTTTGCACAGATTCTAACAGCTTTTAGATTGAAGGATATTCTGACAATTTGAATACTCTTGACAACAATTACCTTTTTCCTGGTTAACACTGATTCAGTAAAATTAAAAATTAATTCTGTTCACAGGAAACATTTATGTATGTCACTGGCAAGTGGACTGATATTAAAAAATGTGTAAATTGAACAATGACTTAGAATTTTTAAAGTTTCTTTTCTCTTAAGTATTTTTGAAAATCGGCATTAAAAGAGATGCAGACTATGTTGCTTAGATTAATATTAAATGATGTGGAATGATTGAAAGAAGTCC

SEQ ID NO: 55 - protein, 1334 aa, Homo sapiens
CAAGTATGCCCAGAAATGGTAACTAGAAAGTAGTACAACCTAAGAAATCATGAATTCTTCCTTTCAAATAGCAGGTGGAATTTAAATGCTAGTTTATGGTTATTATTGGACCTGCCTTTGCTACTTGAGTCACTTAGCACATCAGTAGATCTGTAATATTTCATTTACAGACCAAGTAGACGATTTTTGCTAGATTGATTTATTGAGATGAGCGACTAACTAAAACAAGTTAAATCTCATTGTCTCATCCCTGCATTAATTTTAACGTGAATTTAGTTGGGTTAAATGGACATTTGTTTTTATTATGTCAAAGATGAGACTTTTCCTCCAGTAAAGCAGAATAATGTATCTATATGGTGTTCTAACTTGAACAGTACATAAAGATTAGTAAATAAGGCCCCATTAAAAATACTTATAATGTAAGTAACATGAGTCCCAGTAGCATTTCTAATGTCCATTAATGCTTATTCGGAGGATCAGAGCTCATTTTACTGAGCCATTTAGTCAAACTGTGTGATTATTTAGAAAGTTAATTCATGCATACTAAAACCTAGCTTAAGTAATGCAGAGGGTAGGAGGTAAAACTCTATGGAGATGATAGTCCTTTTTGTTATTTAATGATCAGCCATAATTAACTTGCAAATTTGAAATAATTAGAACAAATTAAAGGTATTTAACTTTGCCTCCCTAAAGAAAAATTCAAATTGCACCAAATGCAGCTTTAAATTATTCAAGTCTCAGAGGTCTAGGCTAGATTTTTTTTTTATAATGCCTTTTCTATGATGAGAATACCAATCTGCTCTTTGTCAGAAGGCATCCTATCAAGTAATTGTTCTTTGTGTTAATAAATGACAGCTATTCTTCTTTGTAAAAGTATTTCAGTCTCCCAAGACTACAACAGCATTTCCATGGCATTTTAATTCAATAAAACAAAAGGTTAATGTTTTTCTACTTTTTAAGGAATGCAAATACATATGGTATTCAATTGGTCCTGAATGACATTTAAAATTTGCCATTAAAGCTCAGACAGACTATCGCGATATAAGATTTGGGCAAAATAGCAAGAAAAGTTCAAGGTGCTCTGAATTACCAGAATTTCATTAAACTTCAAGAACTGAGAATGTTTTTTCTTTCCCCACCCTAAATCAGGGCTACTCAAAAATTTTCATTTAGTATTTTATAATATTAAAATATGGAAATAGAGTTCAGTAAAATCTTAGGAACTTAAGGGTGACTTACAGTGTAGCAAGCCTAAATGCTAGGGATTTAACCTGTCTTCTGCTATCTTGATATTGATTATTTTTTCATCACTTTTAACAGCTCCATCAGATGCT

SEQ ID NO: 56 - protein, 1235 aa, Homo sapiens
GCCTTAAGTAGGAAAGAAACAGCTAAAAGATACATAGGTTATTTTGCTTTTTAAAATTTTAGCAAACTATTCTGTGAATCTTTTGTGTGTTTGGGGCTGTTTGTAGAGGAAAATTTCATCAAGCAACATTTTGGGAACATTGGCCTTTTGTACTCTTTCCTAAATAAACAGAAACTTGTACTCCCCAAAATAAAATGTTTCTTTGTATATTGTTACCTGCAAGTTATTGATAATGGAAGGAACACCTTTTCAATCCTTAGTCCCCTTTCCCCCAACACAGCTTTTAGATTGTCGATAAACTTCCCAGCTCAGTAATTAACTGAGCTCAGTCATTGCACCCTGTATCATGTGATTTTTTTTTCCAGTGGAATACATTATTAGAGCACTTACACAGCCAGTCTAGCTGCAGCAGCCCAGGCGGCAACAGCAGTGCCATTTTTCACAAAGAAAATGTTGAACAGGAGCCAAATGTTTGGTGGCAGTCTGTTGCTAGGAAATCAAGGTCCTGAGGCGATTAATGACAAAGCAAGCAATAACAAGAAGGCAGAATTACAGATTTAAAAGAGAAAAAAGTGGTTGGTGTTATAATTACCCAAAGAAATCCGCACTCATTAAATTGGCTGTTTTTATGATTGACTTTAATTGGAGGTTAGCTCAGATATTTAGCTCCTTTCCCACCCCTTTAAACACACACAGGCACATAATCTGTAGAACTGCAGACTTGTTTTTCTAAGCATTGAGAGGAGCTTGCCCTGTAATTTGATCCCCACTGACAGATGCATTTTCTATGCTGCCATTTTGAATTAACCTATTGTAGAACAATTTTCTTCAGCCCTGTTGAATAAAACATCCAGTCTGATTACCTCCGATGGATTTGATAGAGTAAAAGAATGTACTTCTCATTGAAGTAGATTGTTTGCATGGACTCTACTGATTGTGAACTCTGCCAGTAAGCACAATCATTTGTAATAAATTTTCAAAGAAATTTGTGAGGAAAAGGTAATGAGAGTCACCCTTTTATAGTTTAATGTTTGGCACCTCCATCAAAATAATATAATTCTTATAAGACAGTGTTATTTTTCCAGTAAGCTTTTCACGTGGTTTTAGAAAAAATTTCTGAATCTTCATTTGGACTATTCATATATTTAGGAATAGAGTCTTGTATTTACACTCTAAAATGACCATTCTTCCTCCCCAACAACAGTATTTTAGTGCAAGACTCAATATGCAAAGCA

SEQ ID NO: 57 - protein, 1677 aa, Homo sapiens
TGGGTTTAAGGTGAGCCTTCTATTGTAGCTACCAATTCTCTTTCCTGTGATGAGTCCGGATTCTCAATAATCCTAGACAATTACTTTAGGTCCTAGTAGGTTCTTGTTTTGAAAACAATATAGAGATCAAGTACTCACTACAAATAATTAACCAATAGACACAGGAAACACTTAGAAACAGTAGTGTTTATTTCAAGAGGCATAATCTGAGGTATAAAAATGCACTTTGCAGTGGGTACTCATTTTAATAATTTGCAATATTTTTTGGATTATCACCAAGATTATTTTTATTTTTTTTTAACTGAGGGAAATATGTGTTATTTCATCACGTGACATTTCTTTGAAAAATCTTTCTTGTCTAGATGTGGACCTTAATGCATTATGCAAAACCCAGGGATTTAGATTTTTGACATTGCATACACTCACAATATATTCTAAGTGGAGACATTATATGCTAACTTCTTGTGAAATCCTGTAGCAGCTGCTTGGTTCATATAATATGTTGAAAAATATTTATGTAGTTTGTTTTCTTTTCTGTCAACCCTGGTATCTTATGAAAATTTTTTTCAAATGGCCAGTAGCTAAAGTAGTGACTTTAGTTTGACTTAATATTATGCCACATTGACAGATGAAAACTCCTTCTAAAAATGTCATTTGAGTGCTCGACTAATTTGCATTTAGCTCGAAAGCTTTTAGTGCTTTGCACATTCACATTATAAACATTTGGGTGAACATTAATACCCCAGCTAAACAAAAATGCTATTCACTCCAACCATTTCTTCCACTACATAAAAACTATAAATGATTCTCCTACCAAAAAAAAAAAAAGAATGCAACCCGAAAATCAATTATAGTAACTATTTAGAAATGTAAAGGAAAGGCAGTAAAAAAGTGACAAAAAAATCTTTAATTGTAGGGAAAATGTGCATCTTTTTTTCCCCCAACATGTGAATAAAATGCATTTCCTTTAACAATCACAGTTACAATAGATCCATGCATCTCACAGGAAAAAATTGACAATTTGATTATGACTTGTACTTTTTGCCGGGGCCATGAAAGTGGTTTATGTTTGAAATGTATCAGCTGGAAAGTACTTATTACTCATAAACGCTCTGCTATTTCACTTTCTGCAAAGTGAGCTGTTAACAGATACAATTTGAGCAGAATAGCCAGAGGAGGCCTTTTGATATGCAGAAGAGCTGACCCGCGTGCTGAGCCTTTAATTGGGTTTTTAATTTTCCAGGCCATCTGACAATATCAAACATGATCCCAGTGCTTGAAATGTTGATTGGAGGCTAAGAAGGATGTACTACAACATGGCATTATGGAGAGAAAGAGGAAAGAATGCAGGTAGAGAGGAAGACACTGAGAGGCAAATCATCTGCCTGGTGATTTTTGCTGGTTTTAGAGAATATTTCCAAACAGTTTAGCATTTCATTTTAAATGATGAACATCTGATTATTTTGTAGTTATAGTGAAGATGTTTGAAAATATTTCTAAATTATACACCTTAAGCTACTTAGCTAAACGGATCTGCTCAAGTGAGAACTGGAAAAAAAGCATCCCGCAATTTAACATGTTTTCTTAGGCAAACCTACAAAAGTAAGAAAGTAAGGTTGTTGAGAAAATGTTTGATTAATTTGCAGTTATTTAATGTTTTCTTTGAAAAGCTCCTGA

SEQ ID NO: 58 - protein, 1798 aa, Homo sapiens
CCTTGGAATAATTAGGCTTTCCTAATTATTTCACAACCACACTAATAATCTGAGGTAGATGTTTAATTTCGTGTCTTTCCACACCCCCCAACTATTTGGAGATCACCTGGTTTTAACCTGCATCCAGAGCTGTCTTGCTGGGCTAATGGAGACTCGTGTGGCACACGTCAGGCGGCAGTTAAATAGGGTTGCTCCTGCTGCTTCCCTCATTGCCCAATTACCTGACTGACTCTTGCAAGTCATAGCTCATGGAATCCTACAACTGGGCACACCAGGGCACCTGATCAAACATGATTTTTCAGGCCCACAAGTCACAGTTCTGCTCTATCTCAAAGCAAAGATCTGCCAAGCTCTTAAGATGATTTAGCCTGGAGTATTTTAAATAACTTCAGAAAATGCAAAGCTTTCTGTCGGTTTGAACACTTCCTGTCACTTTTTAGAACACCTGGCACTCAAATATTTAAATTACAATTCCAGCTTTAATGTGAAGGAACTAACAATAAATCCTTTCTCTTCCCATAATACTTCGGGTCTGACTTTTCTTTAATTTTCTAAAAATGCAGATTTGGGAAATGAAATTAGCAATGCAAGGTGAACCTAGTGTGAATTTTACTGAAGATTATGCAAATGCAGGAAATTATAATTCTATCAGGATGTCATTACATGTGTCTACTTAGACACACATTTTCTGCTATGTTTAAGTTAAACAAAACACTAAATGACTATGTAGTATGACATCTCATTAATATGTTTCCATTCACATCTGTGCCTTTAGTATAAAAAAAAAGACTGCTTCAATGATAAGAGATTAGGTCCTTTAATTAGAAACAAATGACAAATCACTGTTAACCCCATGTGATGCTTTCTAAAACTTCCATCACATATTCCTCTTAAAACATTATTAAACATAAGTTCCCCAGATCTACTTCCTAGAAAGTGCCATTTAACAAAACCCAGGCAGGATGTTAATACTGAGGCGGAATTACAGGTTGCCAAAGCATTTCCTGTGAGAGGATTGACAGGGGATCATTTTGTTATGGGGCCACCTCCAGTGTGTTGTGACAACCACTCATTACACCTCTAAGCAGAGCACTCAGCTGTAGGTTTCTACAAGATGCAAATAGCTCCAAATGGGTTCAATTTAGAGCGAGTGGATAATGTATCACTCATTTCTCTAAGGTAGAAGCTTTTAATTTCCCAAGAACAGGAAAGAGAGGAACATTTCAGTTTCTGGAAAAAAAACATTCAGTTAACCAACTATGCCTGAGAAATGGAGTCACAATAGCAATATCTGTTACATTGTAAATAAAAACACTTCACCTGCCTTGTTTCCCCTTGGCCCAAAACGAAACACCAAGTGGTCAAGTGAGCATCACCTCTCAATAAATATAATTACCCACTTAAGAGCTCAATGTCAAAAACTAGTAACCTCTAAGTGATGGTAGGTTTTTCTCTTACAAAAGGAACTGCTTACAAAGCTACTATAGTTAATTATAATAATACTCAAAAAGTGTTTAAAACACATTTTGATATAGAAAAAATATCATGGAAAGCTTTCACAGTTGGACTTTAATATTTTAGTGTGCTAGTTTTTATACCCCTCTGTGATTTTACTCCCACTGTTCTATTACTGATTTTAGTAAGTGTTGCTAACAATGGAATACAGCAGCCTCTACTACCAGCTATTTAGAAGAGAGGTACGCTGATGTGGATTGGAAAAAGTCAATAAGCCCATTTAAGATTCCTGTGTTTAACAAAGCCACAGGAGAAGCCAGCGAGCTACAAAACATGCCCATGT

SEQ ID NO: 59 - protein, 855 aa, Homo sapiens
TCTTCCTGTCTTCCTGTGGGCCCCTCGCTCCCCACTTCTGCCAGCAGCCTCCCCTTCTGCCAGAAAGAGTGACTCCCACCTCAACAGCCTGGAAGCACTCCAACTACCGTACTTTTCTTCAAATAAAAGCAGCTAATTAACATTATTCTTTAATTATTGCCTTTATCAACAAGGGGTCTGATTTCTACCAGCAGGATAGTTGCTTTCCCTTAAACTACCCAAGTGAATGCTTCAGTTCCTGGTGCTTTTGAAATGAATTTGATGTCATCTGCCCAGAGTCACTTAATGGGGACGCCTGGGTAATGACTGAACGCGCTAACTCCGTTAGCAGCCCTGGAAGCATGTAATTTGGCCCCTCAGGCAACAGCACTTTTGAAATCTCTGGATAGTTTTGAACTCTCTGTTCTTAATTAAATATGCAATTTTTCACGGTAACCAGGTTAATTCTTTTGTGTTGTGTTGTAATACTGTTAGGAATTTTCATAGTTCTTATTAAACATTATTCAGGCATTGTGAATTCCATAATTAAAAAAAATGAAAAGAACAAAGCTTGATTCACTCCTTTCTTTTCCCTGGCTAATTTATCAAATGAATTTTGCAAATTTTTCTTTCTGTCCCCAGACAGTGTGGCAAGTGTTTTAAAGGGGAAGGATTTAATTGCCCTGTAGGGATTGGCTGGTTATGAAGGATTTGGCTGTTTGATTAGTAAACCCAGTTGGGAATGGTCTAATGCTCCATGATCTTAAAAATTGTCTGATTGTACCCTCTCCAAGGAGGCCTCTCTCTTCGTTATGTAGAGCATCAACTTCACACAAGTGTGATTATTAGGTAGTGAGGAAAGGGAAGAGAGAAAGA

SEQ ID NO: 60 - protein, 1653 aa, Homo sapiens
AGCCTCTCTCTCCTTCCCTATCCTGCCCCTCTCCGACTCCAAGAATAAGTCACCAGAGTCCCCTAGAAGATTCTTGAGTTTCTGCTCTTAAACGGCTCCTTTTCCAAGGAGGAACGAGGTCTGTTTTCTGATGTTGGGGCCTCAGATACTCTGTGATTGCAACTTAATTTTGTCGTTGCTTCTTTTCAAGATTATTTGGAATGAATTGTTTCTTTTGTTTACTATCCAACAAACGACCTCTGCTAATCTTGTATTTTATCTCCCTAACATATGGAAAAGCTATTTATTCTAGCCAATCACAATAAAGTGAAGAAAACCCCATTTTATGGAAAGGTATATATCACTAGTCTGTTGATCATTAAAGATATGATTACCAGTGAAAACCCTCTGAAGGTGGCACATTTATGCTTCCAGGAACAGATGGGGACACGCATTTTCCTTGCAAATACTTTTGAAATTGCTCTACTGGTAGCAGTATAAAAATGATATACAGATGCCAGGGCCGGCATGGCCAGGATGAGTGCGCCAGATTTACACAGTAAAGCCTTCACACGCGGGCTGTCAGTTTTGATTGATCTCTACTATACCTCAGGAACTTGTTGACTAGGTAGGGAAACAGTGCAAATAATTCACTGCAGCAAGTCAGATAATTCACACAACCAATCGGTCTGCTTCACTTTCTGGCTGTGACATACGAGCCTTCCCTACAAAGATGCATCATTTTCCAGCTTGAGCAATATTCAATGTCAGGGAAGAAAAGGTATTAAAGCCACACAAAAGGAGTTCGACTATCGCAGAACGAGAAGTTATTTTGGTAATGGGGGACAGATCCCGCTCTACTCCAAGTCCCACCAGAGCTTTCAGACCCAATTGTCATTATCATATTGATTAAAAAAAAGTTCGTCATAGTGCAATTTTAGGTTTAACGCCAACAGATCGGGAAAGAGCAAAGAATTATCCCACAAAAGCACAACATTCTTACCACAGGGACGTTTCCCTGTTCCAGTTCATTGATGGAGTTGATTAAGTTTAAATGAAGCAGACACTGGATAAAAGTAAGGGTATTGACCACTGGGCACCGAGATCCGTGCTTGAAAGGACCTGATACATGCAGAAAAGCAAGATTTGCTAAATGCTCTAATCTTCAATCAAATCTTACATCAATACAGACAAAGTTTGGTAATGAGAGATTCAATGAAGCATGCGGGAGAAAGAATTAATCCTCTTGGTCTAAACTGGCTTCAACTTTGAAGCTTGCTCCGAAGGAAAGACAGTTATCTAAATGCTAAATAAGAAACTTATTGTACTTTTCATGGCATGCTAATCTTTTGTCTATTTCATCTCTATTATGTGTATGCTCATAGATTGCAGTTGTCATGGTGATGATATCTAGCCATGCTCGGGGGATGGTGGTGAGAAGCCGGCGCGGAGGTGGAAAAGACCCCCACGCAATCCACAGTACAAAAAAAAAAGAAAGAGAGAGAGAGAGAGAGGGGAGAGGAGTGGGCGGGGACCGGACCCCTCCTGAGCTCTTCCCGCCAGGCCCAGGCTCCGCTCACGTCAGAGTACTAAGGAGGACTGGGCCTCCTGCCCTTGGAACCGCGTGGTGAGGCGACCTCAGCGAGGCGAGCAGCATTCGGTAGTGGTAGTGGA

SEQ ID NO: 61 - protein, 1472 aa, Homo sapiens
CACGCTGCCCTCACTATTATTAAGTGTCATTTTCAAAACAAAACATTAGTGAGAAATTCCAGTTAACTTTGGAAAGCAAATATTTTTAAATATTAAAGTAAACAATTTTTAACTCTAATATCTTCATGGTTCTTGCATAATATGAAGGACTGTTCTGGGAATTTAAAGTTTAGCTTCAATAATGATTACTAAACCAAGAGAAATAGATGTAAAAAAGCAGGACAGCTGGAGGCTCTTGAACTATAGTTGTCAAAAGATTTGTTTGTGAAACATGCATTTTATTGCCTTGTATGCATGTTATAATGAGGCATGGACAACTGCAACATTACACTTAATGACTGCATTTCTTGTTTCAGCCAGTTTCCTTGTCCTCTTGCAATTAACGTTTTCCCAGATCACCCAAGGCTACTTTGTCAGGGAGAAAAAAAAAATCTGAAATTCACATAAATGAGCAATGTCAATAGTTTAGAAAGAGTTTACTTAGAGAACAAAGGGCCCTTATGAGGCACTAGTGAGAAGAAATGGGGAAAAAATGAGTCCTCACAATGTAAGCCTTTTCTTAAAGCGACTTGTTATCAAGCAGTTCAGGATAGTCCCTCAAATCTGCATTAAAATGCATTTCATTCCATTGACTCATTTGCATTAATTTCTCCCATTATATCTGAAAATGGCTGAATGTCTACCCAACACAATGCCACAGCCTATCACAGGCTACCACGGCGGCCCCAGGTGCCAATTTACTCCTCTTAGTTCTTTTCATTCTGTTTGCTGATTCTGACAACTGGAGTTCTCCTCTCAGTCCAAGGGACTTTTCAATTGGATTTGCTCGTGGTGACAAAATTGTTGCTTTGCTGAGAGGAGGGGGTTCTTTGATTGAGCGTCTATCATGCTGCCATGGGAAAGCGAGAGGCGAATGATTCTCAGTGGCTTCTGATTTCCAGTATTTGTTCAGCATTAGGCCCACTTATCTCCAGAAGAAAAAGCAACATGTAGAAAGAAAGTGACAGGCAGAAACACACTCACTTGCTCGTTCATTCTCACTGCGCTCTGTATTCAAACAAGGGGGACCTATTACACTGAAAGCTCCAGATCAGCCTCACTCAATTATCACAGTTAATCCTTATAGCTCTATAAAGTAAATATTTCATTACAATTTCAAATAAACAGTCACCCAATCTAATGAAGCAAGAACTCAAAGTGGCAATGTCATAGAACTCGTTACCGTCATCAAAGGAAAGGACACAGCCTTGTCTACTAATAATGAAAAAATAGATACTGGCATATTTATGAACTCAAGGGTGTTGTAGTGGTGAGGATTTCTTTTTCAGTGCCATTGGCCAATTTATCTTTCCAAATACAATTCAGTTATCAAAATTCTATGTGTCTTTTTTCTCTCTCTCTTTATTTCTCTTGGTTTTTCACCCCAATCTCTTCATGGGGATCATCATCTTCACTACCCATCATCCACACAC

SEQ ID NO: 62 - protein, 944 aa, Homo sapiens
TGGTTTAGTGAGCTTTCCACACTGGTCTAGGGGCCCATGACATTTTTGCTCTGTCCTGATGGTGAGATTCCACTCTAAAACAAACCCAACAGGGTCAGGGCTGTTTACTCAAATATTTCCCCCCCAAAACCGAGTTGTGAAAACTGTCAACCTCACCAACGTTGGGGACACGGATTTGCCTCCAGCGTGAGAAGCGAGTCCCCTGCCTTTGCACTGGGGACCAATCAGAAGACAAGACAAGCCATGGGGTGCGGGCGCCCATGGTATCTGGCCATCTGGGGGCCCCCGCTTCTCTCGGCCGGCTGTGGAGGCAAGGGAGATTTTTTTTCCAGAGCTTGGTGGGGCTCCATATGGTCGAGATCAAAGGTGTTGCTGGGTGCATGGTTCTGCTTTATTTCCAAGCACTGCTGTTAATTAGAAAACAAGATCAGAGGCAGTATTAAAATCCAATTAAATTGATATGAACAGATTGCCAAGTGATGTTCACTAATGTATAATTGAGCACCATGCAAATTTCGGTGGCTGGCTTTTGTTTTTTTCCCCCACACTCTGGAATGAATGATGAGGCTATGAAGTTTTTCTTCATTGTAAAAAACAAACAAGTTAATGCATTGATCTAGGGGGTATTGCCCTGGTGATTGATGAAAATGAGAGAGAAATAGTAAAGTGTGACTTTTTGAAGGGAGGGAGTAAAGATTCTTCTACTCTTCCTCTTTTTTCTCTCCTTGGTTCCACACCCATTTCTTATGCACAGTGGCAGGCCTCGCTTTCTGTTGACATTCCATTGTTAATGATCCAGAGAAAGTTCCTCTGGATTTCAAGGATGGATTGAAAACAAATTTTGGAAGTTTGAAGACAAACATCACAGATAAAAAAGGATCTGTGTGCAGGTAGGTTTTGTTTTAGTATTAATGTTTTGTATATGCCTCCGTGTATTAAAAAGA

SEQ ID NO: 63 - protein, 872 aa, Homo sapiens
TCCACCCACTCCTTTCAGTAGAGTCCTGACCTTGCAGGCCTGAATCCCCCCCATCCATCTCCCTACATTGTGTCTCTCCGGTGAACTCATGCTGGGAGATTAATTGCTGCTATCACCCCTAATCCATCACACTTCCCAAAGATTGTTTTGACATCTAGTTAATTTTTGGCTGATGATTTATCAAATTCTTATTACTGTGCTCTGAAGGGGCTCATTTATTGTGTTGATTCATGGTAATGATAAAAGGGAAGCATTTTGAATTTTAACTACATTTCCCTCATGCTTCTTCTACCCAGTGTAGTAAAAAAAGAAAAGGGGAGGGGGAGGGGACTGTAGCCAGGAAACTCTTAAACAATTCAGAATGTGGAAGGAAAGGGAGAGGGGAGAAAATTCTTCCATTATGTGCGCAAAAGCCAAAATGCTGTAAAAGGTTACACACACATACATACACACACACACACACACACACACACACACACACACACGAAGTATTTTTAGCATCTGGGTCTGAACTACGTTTGGAAAGCTTATACCCCTAAGGCTCTTAAACATTGATTGCCCTGTAATATTACCTAAATGTCTACTACCACTTTATTCAAATAGAACTTAATGGTAAATGACTTCAGTCATGTACCAGTGGAGATGTAAAATGACTGTCTCTGCCAGGCCAGATGGCCATCCTACCTTTTAAAAGTGCAAAGAGACTTTCCTTCACTGCTTCGGCCACTCTCCAGACCTTCCAAATTTCTCATTTGCCACTCAGCTTTTTAAAATAAACCAGATGGTGAGGAGCCCAAGGCCAACGTTAGTTACTCTTTTTGCAAAGACTGAAGGAAGTTAATATCTCAAGGATTGAGCTCAGAAGAGACTTG

SEQ ID NO: 64 - protein, 581 aa, Homo sapiens
CCCAGAGGCCTCCCATTAGTGGCCACTCCACCCTTCCTCCTCTCCCCTCAGGCCTGGTTTGGGGAAAGTGGAGCCACTGCCACTCTTGGTGGGCAGCTGGGGGCCCCTTAGCAGTCTCTCCACACCCCCTCCCCTTCTCCTCAGGCCCCATGCCCAGCCCTGAGGTTTGGAGAGCCTAGTAAGTGCCCTATCAACATGTTAATCAAATTACTTAGGAGCTAAAATTGACGCTGTTCATTAATTATACAAGATTATGCTAATTGTGCATGCAAATGCATGCAGGGGAACAGAAGGTGTTCAGGCGCATGGTGGGCCATTAGCATAGAGGATGGGGTGCGGGTGCATTGGCATGCTAATGTATGCGCCCTGGCTATTTATAGTCCTCCAGCCCATCTGCACTGCAGCCACCTCTACCCGGGTGGGGATCATGGTGGGGAGGCCAGGTCCAGGCCTGGCAGGTGGCTGTGGCCCTGGGGACAGTCTATCTTGGCTTCTACCGCAGGCTAAGACCAGGAAGCAGCCTGGGCCAACCCCACATGGGCCTGAACTATTACAGTAAGCTCCTCATTTCCCTTCCCTTC

SEQ ID NO: 65 - protein, 1656 aa, Homo sapiens
CTTTCAGAGTTGGTGGGGTCTTTCGTCATCAGTGGGAAACAGGACGTGGTGCAGGTCATGGGTGCCAGCCCAAAATGTGAAGAGGGCGGTGTTGCTCAGATCAAGAGGGTCTCACACGTGCTGCTGGGGAGGGGGTGAGGGGGGAGGACCACCACGGAGAGCTTAGAGCTGCACATAGGACTCGGGTGGGTGTCAGGGTGAGATTTCTGAGATAATGAGTCTCATTACACCTCCGAGGTTGGCTACCCAGAAACCCAGCTACCTTAGGGGGGTAAATATAATGTAAAGAGGAGAGGAGACTAGTGCGGGGAAATGAAGGCTGCAGCTGCTTCCCAGCACAAACGGTCCTGCGAGGGCACCCGCACCCTCCCTCCAGAACGCAGCCGCTCTCCCGGGGACGGAAGGAAAGTTCAAGCACCGGGGCCCTCGCAGTGGGAGACCAGTCACATGGGCGGCATCATGAAATTTTACTGCAAAATATCCTCTTTTTCTTATTTGAAAAGACAAATTATTAGCATTTTTAAACAATTTCAATATGTTTAATGGCTGAAAGTTAAGCTCAAACTGTTCCGCTTACTGAATAAAGTGCTAAGTCTGTAAACAGGAATCTTAAGTTACCCCAAGAGTACACTCATTTTAAATTTTACTTGAAAGCGGGATGTACGTTTATTACAATTTCAAACAAAATGCTAATGCCATTAAACAAATGAGGTTTAGGCAAATTAACTGCATTTTAATATTCTGAAAGCCTATGATATAGGACATTGTGTTACGAAACATTGGCTAGAAGTATCAGTTGCAAGGGGATTTTCATCGCTGTGAATCTCAGGAGAATATTTGTAATTAGTATCATTTGCCTAATACTTCAGGTTAATTAGAATATTTAATTGAATAGCTGTAATCTTCAGAGATGACTATATTATGATCAAATCAGCACCATCCCCACGCACGCTGATCACAGGGCGGCAGCCTGCCTCACTTCTGCTAGCTATTCAGCCCTCTGGAGCGTTCAGCAACATAAGAAAAAATCTGTTTCTTACACTTTTGAATTTTAATGATCCATTTGAACTCTGCCATCAACATTTAATTATTCTAGAAAAAAAAAAGTCCCAACCATGACTCCCATATGGCATGTTGGCAAATACTCTTGCCCACAGTGGCGTCTGCACCTCTCCCTGGCAGCTCCGAGAAGAGATTTAACACAGCCTTTTCTCCCCCTGAATGCGAGGGCTTCTTTTTTAATAGTGTTTGCAAATACAGACCAGATGAAGCCTCACAGAAGAGGTTCCTAGGATACTATTGAAGCGCTATTAGGAACAGATGAATTGAGTTTTAGAATGCGACAGTGGGTTTAATCCTGTCACGTTTCCGCTGGACCTTCTGTACGGTGTCCAGAAGGTCTGGGGAGTCAGGTGCCTGTTTGGCTAAACCCCGTTAGCAGGAAATGTCATATTTTTTTAAGACATGGAGGGGGGCAGCACTGGGGAGGGGTTTATACAAAAATCTTCATCCTGACTTGAGAGGTAGGGTCTGGACCCTCTTAAGTGGTAGGATTTCACCATATACACATGTCTTTCATATACACACGTCTGTACATGTCGGCATCATGTACCATCCAAACAGTTTGAAAATTAAAGGATCATCGTGGAGTGATTC

SEQ ID NO: 66 - protein, 1660 aa, Homo sapiens
TTAGCTTTTAAATTATAGCCAGTGTTTTTTTTCTTTGTTTAAGTGCTGTATACTTTGTGGCGCAGAATTATATTTCTGTTTTTAAAAAGCATGTAGGTAGCTATGCTTATAAAATGATGTGAAATATTGGTGATCCCAGGATATGTGTAAGTTTTCTCTTTGATGGCTGACAATTTACATTGAGAAATTGTTTTATAGTGGCAGTTTAGCTAGGTAACTGAATATAAATTTAAATGCATTTGTTTTAATAGCATATTTTATCTTGTCTTGTTTTCTAATTGAAGAGAAGGGGCCAAAGCTAAGTTTGTATAGAATTTAAATTCACTTGGATATAGTACTTAAGCATATTAGTCAATATTTATAAAAAAAGATAGATGCACTAAAGTTCTCCTATTAAGGTTTTAAGATTATTGATTGGAAAAGAGTTGGAAAATATCTTTTTGTCCCTGTTTCTCCCTATATAGCCTTCTTGAAGTTTCTCCAAATTAGATTTTAAATGCCAATTAGGAGGTTGAGTATACTAAAATAAAAGCAAATGCAACCAAAATGGCCTCACCTTATGGCTAGTTAGGGTTTTGAGAGAATAAGCGGAACCTTTGCTCTGAGCATGGCTTTGAGAAAGATATTCATCTTAATGAACACATTAATTAGAACCATAACTATTTATAAGATAATTAGAAATGAAGCTTGGTAAACTGAGCTTTTCCTGCAATTAATGGAGGATTAATTACTGGAGGTAATGAAGTGGATTTTTAAATGCATTAAGGTGAAGTACAGAGATGAGCAAGGCTTTGTGATAGTTGCATAATTATTTCAGGCTGTTTGAGCATAGCTCATATGAGATCGTTAATAAGCATCATTGCATCGTTATGTATGCACTTAAAAAGACTTACCACCAAAATGACTGCCTAATTATTTCTAATTGGCAGGACTCTGTGTAGTCATTGAGCTGTTTGTAGCCATTTTAAGGTTCATTTAACTATCCTTGGGGCCATGTGATAGATGGAAAAAGCTTCAACTACATGCTGGCCTTGGCTGGCGCCGTTAATCAATTTTGGTGGGCTTCAGCTTAAATGCATTTTCTTGTGCAGAGGTCAAAACCTGAAGTAGTCCAAGCGAAGTTTTGCTTTTTGAAGCCACTTGACTGTATTCATTAGCAATTAGTAAAATAATTGTGTCTGTCACTATATTTGGATTTCCATATGACTTGGTATTCTTTTATCACTGTCTCTTCTTATTCCATATTTGCTCCACTGGAAACAAAATATTCTTCCAACAAACCCTTTTAGCAACTTCAGTGTAGTGGCATATGTTTCCATATACTACCTTTCTTCATTCATTTATTAGCTTAAACAGTGTAGTACATTTCAACACAATCATCTAATTTGCTCCTGATTGATTGCTGGTGAAAGTTTCTACTCAAGGACAACATTTTAGGGCTTTTAAGGACATCTCTAAGGAATTAGTCATTAAGCATTAAGAGAGGAAGTAAGAAGTAGTCAAATCCAATTCTGACATTTACCAGAGTTTTGTAGTTAGAAGCATCTATATCTAAGATGTTGAAAGCTATACATATTTTTTGCACCTATCCCCACAAGGACACATGATAACAGGCAAATTGTGTGACGGGGATAAGCTGGGTAATGTCTACATTTACTTT

SEQ ID NO: 67 - protein, 1059 aa, Homo sapiens
GGGGATAGAATGAACCAAAAACACTTGGTTCTCTCTAGTTAAATATTTCATGCCTGATCTGTTGTAGCTTATTCTATGGAAATTAAAAAAAATATTTATTTCTATGTTGAGCTTCTTTTATTTCTGGAGAAAGCATTTCAGGTACTTGTTCCTCGACTTGTGGTATTTGAAATATGAATTCTGAATTCGTGGCTTATCAATAAAAACACATTGACTTTCACGGAGGTTGACTGGTGTATTCTAGTACAGGAGTAGAAACATTTACTTACATTGTGTTCACAGCTGATAAACTGCAGTTGCTAACAGTTTGTTAATTAAATCTTAGTTAAGCTTTGTCCTTCCTGCTTGAAAACAGGAACTCTTAACATCTGAGGCTGCAATTTGCATGCATCAGTCAACACAAATGCTGAACAAAGTGCTTGTTTAGGTAATAAGATAAGGAGGTGCCCTCTCCACATTTCAGCTCTGACCGCCTGAGAAGCAACATTTCCCAAGATTCCCAGCTGCTGCTTGTTCAGGCAGCTCTGTGGTTTGCGCTGCATATTAATTTCTGTCCGACACGGGAATTCAATTTGTACTGTACATTTCATTTCTTCACAGATTTAGATTTATTTCATGTTCTCTGCTTTTAATTAACTCTCTGGCACAGCTGCTGGACAGGATAGAAAAACTCATTGCTCTCCCTGTGTTATGAGTACACCACCAATCATTTGCCATTTAGATGGTGGTGCAGGAGCTATCAGTTTCTATGGCAACCAGAGCCGTGGTGATTGATTCCTTGCCAGTATGGCATCACCACAGGGAGTGCAGCTTGTGATTTTTGTATGCTCGCAACATCCATCTAATTAAAACAGGATTATGGAATCATCCCAGTATATGTTCAGCAACTACACTGCATTCCATTTATGTAAATGTCAACACTATTAAATACAGTGGTCAGAAGCTGTTTATAAAGAAATACTTGCCTTAGTCTTTGGTTGTGCATTGGGAAGTGAGGGCTTAACCACCTGGTTTTGGCCATTTATTCTCTTAAATGGTAGCCTTTAACCAGGCACAGTC

SEQ ID NO: 68 - protein, 1049 aa, Homo sapiens
TCAAATCTTTACTACCCCCAAAATTCCAGCATTGAATTTCCAGGCCACCCCACAGCAACTTCATTTTAAAAATATGTTTGATTTTATTTTCCTAATCTTCTTGCAGCCTTTCTTTCTTTCCCTTTCCTCTCTATTCCACTGCTGCATGCTTTAATTTTGCTTTCAGTCGGTAGTTTAAAAACTTTAGCTTCTAATAACTGGAAAAAATGGTTATTTAAAGATAACTGCAACTTGCTTAACATGCCAGGCTATCATATGCTCAGTGCTTTGAAGCTGCAAATTAATGACGAGCAGGAACAGTGACTATCTTTCAGAAGAAACTGACCTCTTTCTAATGGCACATCGCTAATGTCATCTGTCTACTGCATCTCATTATGTGAATTTCACGGAGTTAAAAAAAAAAGTATCTTAAGGCTGTGCACAAATAAAAAGGACCTTCTAGTATTAAGCACTTTGAAAATTTTTGATCTCTCAAAACACCTTCCTTAGATACTGCTTCCCCCTTTTGTGCATGGCATGCTGCTTATGTCATCTATTCTCTGTGACTAATTATGTTAATTTTGTGCCATAAAAGTAACTGAAGGCTGTTAAGGAATAAAAGCTTTTGAGTGGCCTTATTTCATAAACACCCCTTTTGAACAAGGCACATTTAGTCATATTTGCAGTAACAGAAAGAGTCTTGTGCTAAAAATACAACAAAGGCTCTTGAATATGGCCATTTATTCCCACTTTATTAGGTAATTTATGAAAAAGTATGAAGGGAAGCCTTTTTGTTACTATAATTTGCATAAAGCTGGTGCCCCATTAATGAGATAACTTCCTGCCTTTTGTGTATCACCAGCTGGAAATAGAAATGGGGGAACTTTTCTGTAGCCCAATTACTTAACCTGCTGAGTTCAGAGTTGGAAAATAAACAGGATTCCTATTTGCCGAAGAACTTTATTTTGGTTCCTCTACCCTGATTTTTTAAAATAAAAATAATTAGAAGAAAGATGAAAGCAAAATTTTAAAACTAAAAATTTCAGCAAGGCTTAATGTTAGAATACGTA

SEQ ID NO: 69 - protein, 902 aa, Homo sapiens
GCAGAGTAGGCTTTCAGAGGTAAGTTTGTGGTTAGTACTTTAGCTCTGGTCAGTTGACCATAAATAGATTTTTATACTTGCACATAAACTACTCTGATTGCCCACACATACCTGTAAGTGGATTTGCACGTGTGCGTGCACGCACACACACACACATGCACACACACCTCAAAAAGCAATTTCCCCCCCAGAACATCAAGAAAGTTCCCCTTTCCACTTAAATGCTTTTCCAAATAGTCTTATTTTATTTTTTTTTATTTATTTCTCTGCCATATCCTTTTCAATCTGGAAAGTGACTTGGCCTCTTTTCCCCCATCTATTTTCTGCCTTCCTGCTATTCAGTTTAGGCATGAAACACAGAACTAGATTGAAAGCATTCAATGGCTATTCAATCGGAGAAGAAAAGAGCCCCTTGGAGCTTTATTAGATATGAAGATCCACAATAAAAATCAATTTCTGCCTCTTTATGCAGTTTAAATGACAAAGCACCCACCCATTCTGCGGCCATTGTGCTGGGGAAATGTAATTCAGTCCCCGAGCTGGGCCCAGAGCACCGCGGACTCCCTGACCTGCACTGACAGATTCCAATATGATACAGACCTTCGGAGATAATGACAGCCACTTCATCTCACTGCAAGAAAAAAGTTATCTGATATCTTTGAGGGTTAAAAGGCTATGTGGGCAGCATTTTCAATAACCCACTAAATCAGCATCTTAAAAAATACCTAAGCTTTGTTCCTTTAAAAAAAATTTGCCCCTTACTCCTAACTCCTTTTCTGAGCCCCATCTGATAGTGTCACAAGTGTCTCCTGCCAAATCTATTGAGCCTTCCCTTCCTTGCCACAGAAGGGGACCCTCCTAGATAATTAGTCCAAGGGGAAACAAGGTGAGAAAAACGTCTT

SEQ ID NO: 70 - protein, 1154 aa, Homo sapiens
AAGTTTGAACTGCTCAAGAAAGATTTTTTTGTGTTGCACAGTGAAAATAAATATTAAATATCAAGATGAAACTGAATATTTGAATACCCTCCCAAGCACATTCCCCCATACACACACACACACACACACACACACACACACACACACACACACAAATACACATATACTTTCCTACCAGCAGACTAAATCCAGCTAGTTCCTGAAAGGCGTTTATTTTGAGAATCACTATTGTTTTATTTTACTACATTTGTTTGGAGACTTTTTAAAAATGACTATATGCAAAGAAATAGCAACTGCATCTGCAATCTCTAGCAGCAGCCCTTCCTTACGAGACTGTGTAGGGCATTTGTGGGTGTTGTTATTGTTGTTGTTGCAATCTAGCTAATAAAGGCTTTCTCTTACACAAGAGAATTTTGACAGGGTTGACTCCAGACAGCTTTCCAGCTGAGGTCTGGGGCCTTGCTGAACTTTCAAAATTTTCCCATTTGAGCTGCATCAAAGTGAAGGAAATTCAAGGATCACTAACGTCTCAGATGGTAGCACTTGCCCTAACAACGAAGGTTCAGGAATTCTTTGGAGCAGGCTGAGGTCATTTTTCTCCCCTTTTCTCCTAATGCTTTTCTCTATTAATCAGAGCTCAGAGCTCAGATTGGTCTTCAACTTCCTCCCAATCCTTGCTAAGCCTGTCATTTCTAGCTATTATTTACTTTAATGGACTTTGGCTGATCCCTTATGAAGCTTTGGATCTGAGAATAATAAGGCTGGAGAGCAACGGGCATAGACATGGGTGTGGGTTTGCCTGCAGATTAACCGTGGCAGATGGGCTTTATTGCGGTTTCCTGTGTACTGAGCGTTGATTGAGAGGGTATAATGAGAGAGGTGGTGTCTACACAATGGTCACAGCCACTTCATTGCACTTTGCGTCTAAACAACCCCATTTTTCTAAATCTTTGGGTTGTGAAATTTTAGGAAGTCAGAGCACAAGAACAAGTACAAAAACAACTGTAAATAACCATGAATGTTAATCCAACACTAATTGGTCCCTTCTTTCAGTATGAGTCCATTTTGCTCAGTTTTTAAAATTCTGGGTAAATTAATGGCAAAGATAGTTAAAATGTTCTTGCATTAGGTGGTTTTGGATGAAATAGTGAGCA

SEQ ID NO: 71 - protein, 1331 aa, Homo sapiens
TGCCTGGGTAATACCTGAGTGCTCCCGGCATTACCTGGGGGCTGCCACCCTCCCTCCCCCTCCTTCCTTTCCAGCTCAACATTGAGGTGAACTTTTTACCATGATCGATGTAGCTTTCTGGTGTCTACACAGATTTCTGGATGGCCTCAGAAATGTCACATACTGCTTCGGGAATGTCTGCAAGTATATTTCATACATTTTACCTGGCAATTAAAAAAAAGTCATCTTTAAGATATTAGCATGTGGATACCGAGGTTCCACACAAAGCAAACAAAGAGGTCATTCTTAGCAGCTAATTTTAAATCTTCAGGCAACTATACGAACCTATGTCACAGTCTCTCCCAAAATTTATTATAATGCCCTTGTTATAAATTTAGAATATTTTTGCAAACTCATATAAACAAGTAATTGATGCGACTAAAATTCTTGTCACATATTTATTGCACTATCAGCTAAAATTTTTAAGTGACAAGAACCAAAATAATCGTTAATTTTTATAGGGCAAGGATCTGGCTTTTTGTCTGACACAAAGCTGTATAAAAAACTGCTTCTGATTTTATGCACATTGTTTTTAGTTAATGATTTTCAGCTGTTTGTTGTTTCTCTGATAGCATGAAAATGTACCATATGCTCAGCCCAAAGACAGATGATTAGCAAGTGAGATTCCGGGCAGCTGTCTGACTGAGCGCGTTGGGTTGATAGCATTCTGCTATCATAATTAGCTTAAGCTTTGGGTTAATTAACTTTCTACCTGGATATGCATAATAATAGCAAACTGCAAAAAGCAAGAAGCTTTCAGTACATCAACAACATTGCTGTCTTTTTTATTTGGTATTTCAAGAGCATATTAGAATTTCAAGAGTGATTAATCCTGGGAATATTGTCATCTACTGTAGATTTTATTTGCAAGCCAGATAATACTGAAACAATTGGAATCTATTATAGAGCAGAAATAGCATTTTAAAATTGTAATTAAAGTTTCTAAAAGCAATTGCTAATTTCAAATGCCTTTGTTGGCAAGAATATTAGGCACACTGCTTCTTGTATGGGCAGCTTGTCGGGCACAAAAAATACCAGCACTTACACTGTGAAGAATAAAACTTTCTTTTATTTAAGGGCTGTATTGAAAATAATCAGTTATTTTTATGTAATTTGAAAGTAAGATTACTCTGTAGTTTGCAGAGGTGCTGTTCAGACTCCTAGATTGAAGATATTAACCCTGTGCCCTCTTGCAGGTTCTCACCTTTGTTACCTCCTGAGCAGTGGAGGGCTGGAGGCCTGGGTAGGAGTGCCTGGTGCCCTCTTAGAAGATTTGATGTGTGCGTGTGTCT

SEQ ID NO: 72 - protein, 1160 aa, Homo sapiens
TCCCAGAGCCAATTCCAAGGCCAGGCAAGCCAAGTGCTCTCTACTCTACTCTTTCTTCTGGGTGCAGACCCTGTGAGGGGAGTTTTGGTTTTGCCAGCCACGACCAGGCCAGCCCCTCCCTTGTCTGGCTTTTGTTAGATTGTGTTACAACCTTACTGTTACTTAACTGTAGAGGACTTGGGGATGTGCGTGCTGTGTGTGTGAGAGAGAGAGTCTGTGTGTTAATAGTAACTTGTGATAGATGCCTTTGGCGCCCACACATTCAATAACACCCACACTCACAAAAAAAGAAGTGGGGAGGGGAGTCGTTTTATGGGAGATAACATAACTGCTTGCAATTTGGCTATTCATTGTATCTTTGGCATTTTATGTACTGCATTAGCGGAGGCAATTTCATGCATATGGATATAATGCATTAAGTGGAGGCATTTAAATATAGTGAAACTAATTTTATGATGATTAGTTGAAGGAAAACATTGCATTCGTATCATCTATATAGAAGCCAATTTGCATGAAAATGCCCAAAGTTGCTATGCCAACATTTTCTGTGCTGCTGGTCGGGGTCGCCTCCGAGTCAAGACTTTGTATTAAAAATCGGTCTCCAGTGCCCATGTCTTTTAATTCATTGCAAGCTGTAGGCCATTTGCTCACAAAGCGCTCGCAGTAAAACAAATGAATAGCTAAAATACTCATTTGCATGATTCCCATTTGAAAACGATTCCCCTGAAATTAAAAAAGCGTGTTACTCGGTTGTGAAGATGGATGGGCCAGTGAGGCGGGCAATTAATATTTTCAGCGTTCTCTTTAAAGCCCTCCCAAGACTGAGAACAGCACATGCTAGACAAATTGGGCCCCACAACAGTTTCAGGGCCTCAGCGGCAGCAGCTTGCTTCCACTGTCTCTCCTTTATTGTCTCACTTACATTATGCAGTAATTAAAACTATTTACCATTCCTACTTATCTGCCATCTGCCACCACGGAAGGTTCCTCTTCTTTAGAAAGCCTTCTTAAAGAGCGGCAAGAACAGGAGAAGAGTTGGCACTGACTCTGGAAGGGGCCTCGGGGGTCTTTTCCTGCCCCTGCCATGCCCACCCATCCCTCCATGAAGCGAAGGTGTCAGGAGGTCATGGTATGTGAAGCTGAGTTTCTGAGTGAGCTGG

SEQ ID NO: 73 - protein, 1250 aa, Homo sapiens
CTGAGATTGTGTGATGTGGAGAAAAGGAAGATATGCAGAGATGTTAGCATGGCCACAGGGTGATGGTGGTGGTGGTGCTGGGGCAAGTGTGCACTACTAATAGGAGAAGATGTCAAAAAAAATGAAGCATAATAATAGTGCAATTTATCCTTGCTAAACGTACTGCAGTGTGCTATAATTAAATATGAAAACCTAAATTTATCTCTATGTTCGGTTGTCATTAATTTAACAGGGAGTGCACATGTTCTAATCTAATGGTTGATTTTTTTTCTCCATGTGCAGCATATTAAAATGTATATTAGCCTCAAGGTGCATAAACACAAAATAATAGACCAAAGGTTTTGGCCTGTGGAGAAAAAAAATCCATGCTCAAAGGCCGTCAAGTAGCTGTGATGCAGGGGAGACACTCACTTAGCCTCATTAAGCCAAAGCTCTCTTTTGCTTGTCTTTTGTTCTGCATGACAGCAGCCTCTTTGTTGTATAATAATTCATTCCAAGTTCGTTCCAAGCTACCGAAACTGGTGAACTGTGGCCATTTTAATGAGAAGTATTGGTGGTATGCATAATCTGGAAGCCACGTGGGCCAGACAATCACAGAGCACTGCAGCCAGCAAAATGAGATATTGTCGAAATCACAAATTTGTCAAGTTGTTTTTGGACAGGGTATTATAATAAGCACTAAAATATGCATCCTATTACTCTGCATCTGCCAGTCAAAGATCACTGTAATGAATGCGTGCTGCAGGGTATAACCAGGCCGTTTTCCTAAGTAAAACAAACCACAGAGTACAGAAAAGAATTGTGTGGGTTTTTTTTTTTTTTTTTGGCATTGTTTGACTTTTTTTTTTTTCCTAATCCTTTTGCACCAGGAGTCAGGTTCTCCTGGCATGGTGTCCACTGCTAGCAGTGAATACACAGGCCCTGCTGGTGCCAGGGAGTTAACATGAATACATTGCTTTTTTAATAGGTGTGCTTACCATCTGAGAATACAAAACCTCAAACTCAAGGCTTCAATTGAGTCTACTGAAGAATTCCTGGGAGAGAAAAGGGAAAAAGGAGGAGAAAAAAATATCTCTCCCAATGATCCTAAGCCTTATGTTTTATCCTTTTCTACTTCAAATGGCTTAGCCTTTGGGACTTGTTTTGTTGTTTGTTTTTCTGTTTGTTTATTTTTGCTTTTTTGTCTGTCTGTTGATTTATTTGCTTTTTAGATGAACCTAAAGCTTTGGGAAGAAATGGGTGAGATGCTA

SEQ ID NO: 74 - protein, 1657 aa, Homo sapiens
CTGGGTTCCAGAATATAAAAGAATATCGTGCTGTGCTGCAGTATTACAAACAAATAAAATAGGCCGAAAAGAATCCCCCTTCCACTTCCATAAAAAGAAAAATGCATCTTCATGCTCAATGTAAACATCACAAAAGCTTGGTCAATGGTTTAATATTTAAAAAATGGTTTTGGGTCATCAGATAACTATAGCAACACAACGTGGAAAGAAATTTTTTTAAATGAATAAAATATATACAAAATTTCTTGTATGTGTAGCCAAAGTATCAGCATTTTCCATATAGAACATCCAATATTTTGCTGCATTTTAATTAAGGTGTCTAAACATTATCACAAAGAACTGCAAATTGGTCAGAGCATGCAGTAAGGAAAATTAAGCTCTAAAGGCTTTTTATCACCATATTTCAGGAACCAAGGGTGTAAAATGTTCTAATTTGGGATATATTAAAAGCCATAAAAGGTCTTTCAAAAAGATTAATGGTACTTTGCTTGGATTTAAGATAAGGGCTTTAGCTGGTTGGAAAAGCAGGGCCCTGGCTGGACCCTTGAGGCATTCATCTTTACAGCCACTTGGAAGATTTGTAAAAGCGTCTGCATAACCTCAAGCAAATGCACGGCGACATTTTTTTAATTCCTTTCAATTTTACAGGTTTAGCGTGTGTAAATCATATTGGGTTGTAAAATAGATATAATGGCACATCCTTGCAACACAGTACAGATTTTTAAAAGACAAACTTCAAAATAAAGTTAGTTTTTCTTGCAAAATCTTGTCATTATAAAGTTTGCTGATAATCATTTGAAGTATCTGATTCAAACCGCTTAATCTAGCATAACTGTAAATTTCTTATCCGTTTCAGAGTAAATTTTACTCATCTCAAAATTACTAGCTTGTAACAGATTTATAAAGTTTTCCTCCCTTTTGAACACTTTCAAGGCACTTATTTAAAAATACCAATTATCATACTTTAACTTTTTATGGAATAATAGGTCTCTATGAAAAATATTTATGCCATTCTCTTTTGTTCTTTAATTAAATGAAAACAGATGTTTTCTGAAGTAAAGCGGAACCATTACTGGAGTACTTAAAGTGTTAAGGTCTTTAATTTTTATATCAGTTTGGTCGACAATTCTTGATTGTCTTTACTCAAGCTCAACATTAATGTCAAGCAAGTTACCTAGGAGACGAAAGAGATCAAAGAGACAAAAACCCCTCCAATGTCTGATTAATCAAGCCTGCAAACAGCTTATTTCTTTTAGCCTGCATGCAAGTATGAAAATGAGATTCTGGGAGCCGAACATGGTGCAGATTTGTTCATTCTTATCAGAACAAAGCCAGCGGCAGCTTATTTCATGGATCATTGGCACTGTCATCAGTGCTACACAGAACGGGTGACAGCTCCTCATTTTGAGGCTTGAACAAAATTAGCAAAAAGTCGGCACAAATTAGCCTCTCATCTTTTTAGTAATATGACATTATTCATTTACTTTTTATCCAATTTTTAATTTTTTCCTTGTCAGCTATCCCTTTCTAGTGTCTCTTGCATGGCATCATAAAATGCCTTCCAAAAAACAAGCAAAGAAATAGCCAAAGTTGAAATAACATACAAAGTTCAAGAAGCAAATAAGAAAAAGTACTTCCAATGACTGGTAACACTGTG

SEQ ID NO: 75 - protein, 1762 aa, Homo sapiens
GGAAGCTCATTATTCTTCCAAAATAAAGAGTTAATTTTTTCCCTACTGGTCTTTCCATCTTTGAAACACCATGAGTCACGGTGTTTCCCATTTCACAAACACCACGGATTCTTTATTGTCTGTGAGGCTTCCATGTACTGCAGTAATTTTGAATTGGATATGTTATGTCCAAATTGACAGTAGTGATTAAGCCAAAAATAAGTGCATTTTCCTTTAAATGTTAGCTGCAGCATCAAGTAACATTCCCTACATTATGCTATACTGAAACAAGTCAGTCGGCACCGACCAAAATGTTGATGGATATACAGCAGATCAAAAAGAGGAGAATCATTTTGAAGTGCTCGCTATCTGTCTGAGACGATAGGCTTCTGAATTTGTACCTCTTTGCAAAAAGAGACTTCACATTATTTTGTCAGTTTGTTTCAATTTGAGAGGTGTTGAAAATTGGTATTCATTTTTTTGATATAACCCTTAAATTGTACAATTTAAGAAAACTGACTGAAAGAGATAAATTAAATGGGTAGAAATATTTTCAAATCAAAGACCAACTGACACATATAAAAATGATGTATGTTTCTTACATGGTCCACAGGGAGAATTCTGCAGGCTTGCTATGATCTCTACAATTTGCTTCAGGGCAAACTAGATTCTGGGATATTCTATTATCCCTTTGGTCTGTTTATCATGGAAACTGATGTACAAATCGAGAGGTCTTTTTGGTCTCTTTCTTTCTATATGGTTGGAACTGGTAAGAATTCACTTATCTCATGTCCTCACCTTCGGTAAAGTGCTACAGAAGAGTTCAGTGACCAGTAATCAATTATTATTGAGAAGCAATCAATTGCTAATTTCCATAATTATGCACATCTAAACACTATGAACAAGAAAGAGAAACAAAGCTGCACTCCCAGCATTGCCTTGTTAGCAGTATTTTGTTAACACAGGCTCTAAAAAAAGCTGCCGCAGCTGGTACCACAAATGTGTTTCCAGTATTCAGGCCATCAACGTGATTCGTCGCTAAATGTATAGAATCAGCTTCTTGCTAAAAACTACAATTACAGGTGATATACAGATTGAAATCACAGGGCTGGTTTGTCGAAGAAAATTGTCCTAATGATGGGTTTTCGGATGGGGAATGCAGCTCTTTTCTTTCTCTGTGATGGGTTGTGAAGGCAGCTGCACCTGCCTCTATGCTGTATTCTGCCGCACTTAATGATATCTGATGATATCATTAGGCAAAGTGTTCATAAACAGATGTTGAGCCTGTGCCTAAATGCTGTCAGATGAGCGGTTGCTGGCCTGAAACAGTATTATTTATATAGAACATTTACGTTTGTTATGTTAATAACCCCACTATTAGCTCTCTGGATGTTGCGTTAGGAATGTAAATGTAGTTAATATGAATAACAACCTCTTTACTCTTTGTGCTGCAGTTGAGTATAACTTTTAGGCTTTGGGAGAGAAACAAAGATACCCCCACCAAGTCCTTTTGACTTCGTGATTTTTTTTTTTTTTTTTGGCACCATTTGAAATTTTGATCAGAAGATAAATGGTAAGAATCCTAAGACAGATGTTAAATATTAGAATTTGATTTTCCTCACGGTTCATAATTTTGAGAGATTTTGATATCTGTAAGTTATTTTGTGTGAGCCCAGTTTGTTACCCTAATAAATCAGAGTGATGATCATGGACACTCAATTGACAAAGTATCCATTTCAACTAGAATGTCCTAAACATACTGTCAGATATGGACCCATTTTTG

SEQ ID NO: 76 - protein, 1148 aa, Homo sapiens
CTGATGGATGAGCTCTTTTGAGCTCTTAATGTTCTTACTGCTTTTAGAGAACTGTAAGGATTTTGGGGCAAAGGAACTAATACTGAAGTAAGCAGAGCAGTGAGACGGGGGGAAAACATTTACAGGATATTCCTGCCCTTGGTTTTATCTTCTCATCATTTAACAGCAGCAGAATAAATGGGTCTGCTAATGAAACAGCACTGAGAGGTTAGGTCATTGGAAGCCTTTTTAGTCATTTTGTGCTTTTCAAGAGCGAATTTGTTAGAATTATGCTGAATACCCACTTAAAGCCTCAGCTGATAACCCTACCTGTGTTTTATAACTCTGCACTGTCAGAACTCATAATAAGTCAAACATTCTTTCAGTGGTGCTCATAAGGGAGGGAAAAAAACCACGCAAATTTAAGAGTAATTTCAGATTGTAAATGAAAAGGAGAGGCACGACTGTTCATTTGCACCAATCATGCCTTCCTTTCATCTGCTCTGATTAGGCCTGGTGCGGTTTCATCAGACTCCTCCATCACCGAGCTGTCACTCCAGCCGTCTGTTGATTGAAAACAATCAAGGCTCTGATGGCACAATTATTCTGACCCTTTAACTAGAGGCTGCTGTGATAATGAAAGGTTGATTATGATAGTTTGTGCCTCTTTCAGTTTGCCAAGAAGGTTAATTTGGGCATCAGACGGATGTTTAATGGGCGCTTGCTGGCTACACTGAGGTAAATGAGAACGTGCAGTCTTGGATATTGCACGGATATAGTTTGGCTGTCAATCATTGTCATTTGGAGTTTGTGCCTCACACTCTGGAAATCACATTTTATTTTTTCCTTGGGATTTAATTTATTCTGTGCCCTGAGGAAGTTCTTTCACTCGGTGACCTTCACAGCAGCTTTCTCTGCCTTTTTTTTTTCTTTTTTCAAATGGAGCTCAAAGGCACAACACATCTAGAAGAGCATTTTGCTTTCATTTTCACTTAAAAATGGAAACTTTAAAAATCCGTCCTTATCACTGCCTTCCAATAGAGCAAATGTTTCCATTCCGATTGTGCAGTGGGAAAGTATAAACGACAGGGATACTTTAGCCAGTTTGCTAATGCAGCAGCTCACACAGTTGTTCTGCCCTGTTTCGCACAGTAACCAGCAAATGCAGT

SEQ ID NO: 77 - protein, 1233 aa, Homo sapiens
CAAGCTGGGTTTGAACAGTTTAATGTTACATAATAAAATTTTAATATGTATTTAAAGTATCTACTTTAAATAGTTACATTACCTTTTAGCATATTAAACATGCTAAAGACACACCAAAGTCACATAGATGCCAATTATAATTCATAACTACCAATGAATTACGACTACTGCCTTACATTTTCCAAGCTTATGTCATAAAAATCGGAAAATCAACTACTTCCCTGGGTAATAATATGCCAATGACTAATTTATTACATTACTTTTTCTGAAGAGTCTTTTTGGCAAGAATTTTAAAGAAAAAAAAGTGCCCTTGTTAACAATGATCAGCAGACCTCACTTGTTTCTTTGTAAAGATAGCCTTTTAGAGGCAGCTCTCCTTTTAAATGAAAATAGGGCAGCAGTTATGGTCACACTTTTTGTTAATTTAGTTGCCAGTCAGCCCCAAATCAAAAGAAAATAAGGCTGCAGAGTGTAATTAACATTCAGTTCGGTCGTTTTGTCCCTTGTCTAGCCCCCAAGCTTTGTTAAAATTGCCATCTGAATGCTGAAGGCTGTAGGGAAATCGATTTGATTCTAATCGCACCATGAAAAGAACATGATCTAACTGCTTTCAGCCCTCCGTAAATCTGTACTAGGTCTTTAGCACAATGCAACTTCCAATTTAAAAAGCACTGAATGTCTCGTCAATGACTTTGTGAAGAAAAAAGAACAAGGAGCAGACATAAAAATTCCAATAGTTGTTTAAGCATTAAAGTTCATTTGCATCACAGCGAACCTGAAAAGGGCTGACCTCTCAAACCGCCTCTCAGGTCTATGAAGTTGTAGCCTTGACAAGCTCACATTGACAGAGCTCATTGACTCTGAAAGGCTACTCTATCAATGGTGAAAAATGGCAATAGGTTCTACTCTGAGCAGGCATCTGCCTGCCCACCCGCTGCTAAACCAATGGCAAAACCGATTCAAAACCTGAATCTACCTTGTAATCTTTCTTTCTAGGGCCTTTTAATAATAGATTAAGATTACTATACAATTTGAGGTTTTACTTTTACTGATGATTTTGGGGGTGGGTGGATGATGAAAGAACTAGAGCAGAACAAGTTTTCCAAGCCCACTGTTTTATATTAATGTATAAAATAGTACCCAAAAGCTTAATACTACATTCTGCAAATACTTATTACTTAAAGAAAAAAATGTAGTTACCACCATCATTTCATCAGAAGTTTAAACCCATGC

SEQ ID NO: 78 - protein, 1273 aa, Homo sapiens
ACATCTCAGTGGCTCATAAGATTCTACTGACCAGAGCTCTGCAGAGCCCAGGGTGCAGGCTGGGAAGGAGAAAGCAAAGGGGACCTCACAAGTCAGAGTCATTGGTTTCATTTCCCAATATCCAAATGCCTCTGTCCAATAAGACCTATAACCAATTTCCCAGAGAAGGCCCCCGAAGAGGCTGAGCTTGATGGAGTTGGGTAGTGGGCTTTTTTTTTTTTTTTTTTTTTTGGCTTTTTTTTGGACTAAAAGCAATTTCCATTTTATGCCTTTTGTCTCTTCATCCAAGCAAATGCCGGTGGGATCTGGCAACCTGAGTTCAATAGCCAGTCCTTTTGGTCTTTCAAAGGCTATGAATGTAATAAGAGCACTCAACCCTTCTGAAGATATGCAAATCCGTGCATTTAAAAGATTTACATTCATCCTTCACAGGCCCTGAAATATAAATATGAAATACCCAGAACCTTGTCACTTCAGTAATAATTAAGCTGATGGCCTATTATGTTCGATTGCAAATCAATATAGTATCTTTTGGTGCCACTTGAGTTCTTGAGGGTTGGCGCGGGGCCAGCTCCAGTTATACAATTGAATTGCTGCAGCTGCCTGGGAAACTTCGCTGCCGTTCCCATTCAGGAAGAATAGGCGGGTAACAATGGTGACCAGCCTCCCTACAGTAATTGTGTACGAGGACACATTTCCAATGGGGTTTTTGTTCAGCAGGTGCTGTTATTTTAGTTTAATTTGAATTCTGAAATATGGAGGAGAGAAGGAGACCAATCTTAACAGCATCTAACCTACAGCTGTTCGAAAGAGGCCAGCAAACAGCATATGTTGCTTAGATGGAAATCATAATTGCTCATTCTCCCTGGGATGTTGGCCCACCAACGTGGAGCCTCTGAAATTAGCTGGCATTTTTCTGGCATTTTCCTCAGTGGTGAGGCCTCTGCAGAGCTCAGGAGGAACTATTCTAGAGTGGCTCGCTCCCTGGGAGGCTTTGGTGGTGGCGGCTGCTGCGTCTCCTTTTTCTTCTCCTTCCCTCTTTCTCCTTCATGGTAGGCTGAGGTGAATTCCAAACACTACACAAAACACATCCAGGGTTGGCCTCCTCATTGGAGGCTGCCATGGGGCGCACAAGGAAACAGGCAGTGGCGAGGTCTGGTGGAGCCCCAGGGCCAGACTCTCTCTGAGAGCAGCGACCAACACCCCTGGGTCAGGGTCAGGGCAAGAGGAAAACTCAGATAGTAAGGAGAATAGCATCAACACAGACACCCTG

SEQ ID NO: 79 - protein, 1015 aa, Homo sapiens
AGCCTAGAGCACAACAACCCCAGGGACAGATGTGACAGGAAAGTGGAAGGTCATTAACGGTTTCATCCCCATTATTATAGGCCCAAAGCCCACCCTTATGATGCACTCTGCTCTAAGAGGGCTAGAAAACCAGTATCTTTCATAGTAATGACTTCCAGTTTACAGCCTTCATTTGTTATATTTCCTCAATAGCTGTTGTGTTGAGATTAACTGCATAAATGGTCTGCAGCTGTCTGTTATGAATTAAGGGAGTTTAATCAAAGTATTTCTAATGTACAGCATAATGATAATACATGGGGGAAGTACTATTTAAGAGATAATGATGGCTTCAGAAGATCACTGTTGTAATGTTTAGTGCATATGCCTTCAGCATTGAATTTGTTGTTGTTCTGAATATGCTTAATGGATCACTGAAAAGCTGCCTAATGCGGGATTGTTTGATGGGGCTGACAGAGCTGGAATTAGCCCATTGCTGTTTACTGCATACAGCCATTAAGATTAATTGCTGCCAGATAATTTTGACTGTTTTTATCTTCTGGAAAAAGTGTCACTAATGGGTTTATAAATTGGTTCACTATTACTAATAGTAAGGCCAGTGTAACACAATAGAATGTCAGCTAATTCTAAAGATAAAGGTAAAAAAGTATAAAGTACTATATGGCTTGCTAGTTTTAAGGGATACTGTTATCTAATAACAGACAGACTGATATATGATGCTCATTAATGCTATTTCCTGAGCTTTGGGTTGAACCTAATAGATGCTAATAAAGTCTTATTTGATGTCCCATTAAAAAGCTCAATCTGTTTTCTGCATTAATGCCCAGTGTTGTTTATCACATCTTTGATGACTAAAACCCAAGTTCCAATCTGTTTCATAACCAAGCTTTTTCTGAGTGTCTTTATCCCTATTTTGGTTTTTCTACACATGAAATGTGTACAACCAAATCAGAAGAATTAATAACGCACATAAATTTATAATCATGATATATGGTGTATGTTACCTGTGAAGTTTACA

SEQ ID NO: 80 - protein, 1630 aa, Homo sapiens
AATGGGCAATATTTTGTGGCTTTTTAAATTACCTGATTTGGGAATGTTAAAATATTCTTTTCTGTTGAAAAACATATGTGAAAATATGCCTCTCAACTTATGTGAACTTAGTGAAAACGTTCAGTGATTTTGTTTGTTGCCAATGCTGTTTTTCTACTTGTATTGAATTATAGCCATATTGTGTTTATTTATGTTATGATGATTAGTATCATTATTTTAAATTTGTGTCTCTCTGCTTGCAGACTTCCTCTTGATTGGTACAGTATGACAACAGGTAATAGATACAATAGCACTAAAACAGTCATCATCGCTGCTGGGATGAGAAACCCCTCCTCTTTGCTTTTTTTAACCTTCCTCAGCTGGAAAGTTTTGACATCTGCTGGTTTGGGACATGGCTGAGCAGCTGTCAGCAGTAGGGTAGCTGCTTTCAGCAGCAGTTGGCGGGATGGCAGGGTGCCAGCTTGTACCATCTGTGCGCCTGACATTTCATTCTAATTAACAGTAGGGTTAATTGTTCTGGCAGGCTCAAATGTAGTGTCTAACATTACCCAAGGGAAACATGTACAAGTGCAGGAGTGGCAGGGAGCTGGGGACAAGCATCGCTAACAAAACCATCGAGGGAGAGTGGTTAACAACTAGCGGTGATTTTACTAGCTGGCCACTTGCAATAAGGCTAAGGTATTTTTTATTCTGATGAATTATGCCAAGCCTGTAATGATATAGAAGGAATCAAGCTTAGAAAGGCTGAGACTGCTGCCTTAGGGCAATTGTGAGGGAACAATTTGCATGTTATTACTGCATATTCATACCTAATTGTGTTAGGCTTTGCTAATAGAGCAGAATGACAGTATGAAAAATCGAGCAACTGCTTTAGAGGCAACAAAGCCAATATTTTTTTCTTCCTACACTATGAGTGCTGAATGATCATTTAGACATTTAGTTGCTCAATATGACAAGTCCACCATTTGTTAGCTTGACATATTATAATTTATAAAGGAGTATTCTAATTTTACTTTTAGTTTATTCTTCTCATTTTATACAATATTCATGATAGCAATTTGAATGGGGATATTCATAGCTATTGTGAGTAGCTGTGATTTAAATAAAACTATATTTGGTATGAAATATTACCATTGTTTTATGATGTATTAATTTTAATGTTTAAATAGCTTTTTCATATGTTAATATAACATAAACCAAGAGTTGATGAGAAATCCTTATTATAGTGGTGCTCACTCACATTGCTATAGTTAATGTCTCAACATTTCCATTATATGAAGACCTATTTTTAGTGTGGCTTGGACAAAGAAATTGTCATGGGGTGCAAAGCCAAAATCTGCTGTTTTAGAAAAGTGACTACAGATTCATTGAACTGAGTATCCGATTCCATCTCCTAAGCAGATAATATTCTTAAGAAATTTTAAGCCCAGTAGTACATTTTTTATGTTAGCCCACAATGCCTTTTAAAATCTTTTTATGGAAGCTCAGAGAAGACAAGGAATTAGAAAATTTAACTTTAGAAGACTACATTTTAAAACTGGTAACATATATCTTCCATCTAATTTTCTTTCTTTTCTGATTTATAAGGCCATAGTTATATCTTTGATTTGTTCCAATTTGGCATTTGAAT

SEQ ID NO: 81 - protein, 1285 aa, Homo sapiens
TGCAAAGCACAGAAGGCATTTCCCCAGCCTTCTTATCATCACCTGAGTCAGGTCCGTGGACAGTTAAGAAGAGCTTGGCTAATTCCATCAGCTTGGCTCTCTCTGCCCTGTTCTGACTGACAGGCCGGGCCCCTGCTCATCCCTGAAAACTAGCATCGGGGAATGACATACAGTTTGATAACATAAGATGCTTAGGTTTTTTGGCTCAAGTGAGATGTTCAGAGCTAATAGCCCTGCGAGCTGAGTTTTAGCTGTGATCTGCACCTTGAGATATCCGTTATGTCTGGATCAGGAAAAAGGGAAAAGAATGAGAGCTTATTTCTAGAAAGGTTTCCGATGAGCAGCATTTGTCATTGAAGGGGAAGATGGGTATAATTAGCTTGTCAGTCTAGTTTGGGCTGAGCAGGCTGTCTCTGCTAAGAAAGATGGACTAACTGCCAGGGCCACTGACAGGCAGTCGATAGCGCAGCAATTAATGTCATAAATAATTCCAGAACCAATTACATCAAAATGGACTCAGAGCTTTAAAAAGGTACAGAATTCTCTTATTCTTCCTGCTAACAGCAAGAAACAGCTTTCATTTTTCTCTGTAATTACTTTTCATTGTATATAGCAATACAGCTGAGCTTTTCTGTCCATATTTAAGCCTTGTCTTTCTCCAAGCCTCTTCCCCCACCACCAGCCTCCCTCCTTCACCCCACAGGATAAGGCTGTTAAAGTTGTTCTTCCCTGCCAGAGCAGTGGGGTGAATGTATAATCTTTTAACTTGGCTGTTGCAGGAGAACTCCAGCTACACCTAAATGATTAAGAGCCAAGTTTTTGAAAATGTCATGGACAATGACAGCACAGTGCCCCAAACAATGGCATTTGGAAATGAAGACATTTGTGAAATAAATGGATTTGTCTTATTATTTTAAAGGTTGCTGTGACTTTGCTTACACTGAATTTATTGATTTTTCCCCCTTCTCCTTCTCCTTCCTCTTCTTGTTCTCCTCCTCCTTCTGTACAGTTGCAGGCATAGAAGCTGGGCCAACTATTCCCTCTACACTGCAACCACAATTCAGTACTGCCCATGTGTGCTAATGGGCATTTTTTTTTTTTCCAAAGGAGGATCAGTCTCTTAAACATAGCGTTTTACTAAAAAGCTATTCTCTTCAGCTGTCTCAACTCTTCAGCTAGTTCTCTGTGCATTACAGTACATATGTAGATAACACAAAGGCTATTATACCCATAATAGCAATGACATACCAGATACCACTGGTGCTAATAGTCTCTCTCTCTTTTC

SEQ ID NO: 82 - protein, 786 aa, Homo sapiens
GTTTAAAGGGGTTGGGAGAAGACAACATATACTTGGCTTCAAAGTGATTACATTCACTAGTCAAGCATCTGACCACATCTGTCTTCATCAATGAGAAAGGTAATAATGCTTTGATGATCTGCATATCGGTGTGCAGTGGGCGGCTTTGAATGTTTCCATCCAATACGTGGCATTTTTTGAAAGGAAACTTTGTATTCATTTCTGAATGTTTTTGTCCTGGCTTTTACAGTTCCTCACTGCTATGTTGCAGGGGAAAGTGTGAGGTGGTGGTTATGCATTTTGCAAGACAGTGATTCTTTATTTTATTACAAAAAAAGACCAACTCTGGAAGGCCAGATTAAATCATTCCTTTCACTTTTTAATGGGATTTGGATGAATAGAGTAAAATATGCACTTTGCATTCATTGATAGCATCTTTAGGTTGAGGTAATTGAGTCTTTTTTCCCTGAGTGAATGAATAATGACTTCATCTGATCCTCAGTGAGGCCTGAAACTTAGACCGCCTTTGTCACAGCAAAAGGATCTGGGCTTTGAAACATGCTCTACTTCCCTGGCTTAATTTTTCTTCATTTTAATCCAAAAACCTATTTTTCTCAATAATTCAAGCATAAACTATGTAGTAGTTGAAGTAGCGGAAATTGCACGATATTTGTCCTGGTTGTGCTGCTTTTTAAATAGAGCTGATAAATCAGCCGCTGTGGTCTTCAGCTGCCCCATTCTCAAGGGAAGGCACAGCCCATACCCGCAGCAGCGTTGGGAACTTCAGAACTGGTTGAGTACCGCTCC

SEQ ID NO: 83 - protein, 856 aa, Homo sapiens
TGGGAGGTGGGTGCAGCTACAGTCTCAGTTGATGGCGAGCGCCGGCGCAGAGTCTGACACCCCCACCACGGGGCAATTTAGAAGGTGGGGACAGCGGCAGCCAAGAGGGAGGTCCCCGGCCCTGGGACAGACATTCTCCCTACTGCTCGTCATAATTGCTTTTCACCAGGTTACTTTTTTCTCTCCCCCATCACAAAGAGCCTTAATCCCAGTGAAGACCGCGCCGTGTTGGGGGTAGTTTTCTGGGATGTGTGTCGGGAGGGTGGTCTGGAGCCACAGCTGATAACTGGCGAGTTCAATGGGACTTAACGGGGGCAACACCCAGCAATTACTTGAGGACAAAGGGTTGGGGGCCCCCCAGGTGTAGAAGACTGGACTTTGGGGGGTGGCTGGGGAGGAGGCTGGGAAGGAGGTGTGTTGGGGAGGGGGCTCTTAAAATCCCTCTGATTTCCGCAGGAATTTGAGACATTCTTTAAAACTCTAGACTGCCTCCCCGCTAGCCCGGCTCTCCGGCCCACCCCTGCCCCTCCCTCGCTCGGGTTAGAGACGGCTTCAAAGGTGGACGGGGCCCTTTGTCTTGCCTCCGCTTTCTTCTCGGCCTTTCTCCGGCCCCTCCCTCCCTCCCTCTCTTTGACCTCCCCGGTACCGACAGGCCTCTGGGGGCTGGCTCCAGAAAGCCCTCACTGTTTTCTTTCTTGCTTTTTGAGGTGAGACCTGGCAGGGAGGGACAGAGAAGGGAGAGGGAGAGGGAGGGCCGCTCCAGAGGCCTGTGCTGTCCCAGGGAGTGCCCTCATCCCACCCCATCCCCGAGGTATCCAGCGCCTGCTCCCGCCCTGGGTCTCTGGGTCTCTGGGTC

SEQ ID NO: 84 - protein, 1237 aa, Homo sapiens
ACCCCACTCCCATCAATATGGATGCCTGGGGTGGGGGTCTCGTGAGCATGTCCAGAATGCCTGGCCAGGGTGAGGTGACTCCTCACCTAGAGGGCACAGAGGTCAAGCCCAAAGAGGTTTGTTTGGGACGGGATGCAGGGTTCGCTTCTCCACACTCCCCCCACCCCAAGTCGGCCCCCCACCTCCCTCCATGCACACCTCCCACCCCCAAGTCTCAGCCCCCAGTGCGAGGCTTGCTCCCTTTTTTGTGATCCTCCATAAAAGTGCAGCTATTAAAATGCACTGGTCCAGAACCGCTCTGGGGAGAGATCGCTTGGCTTTCCCAGGCCAGAGGCCCGCTTCTCTTCATATCCAGTGGGGACTTTTTTTGAAGGTAAATGCCTTTTCTCTGGGAGAGGGAAAGGGGCAGCCTTTGAAGCAGTGGGGGGGTGGGAGAGGGAGAGACAATTCCCCCCCCCTTCCTTCCCCCTTTTGCTCCAGCCCCGTTCCAGGCCTTTTGCTTCACACATCCAGGGGGAGCCAGAAGAAAGCCCCCAGCCTGGCTGGGAGGGGGCTGGGGGTGGGCCCAACCTGTTCTGGAGGGGAACTAGCACAATGGTGCGGCTGGCCGGGCGTTTATGGCCTGGCTGAGGCCCCATTCAGGACTCAGGGAAGGTGGCAAAGCGGTCCTTTCCCCCTTGAAGTGCCCCCTCACCCCCCTGGGAGGGGGGGCCAGCAGGCCGGACCACAGCCATGCTTGAGGGGCTGTCTGACAAGCAGCTGTCTGCAGTGGTGGAAGGGGAGGTCCTCCCGCAGCGGGAACATGAAAGGGACAGGCTAGGTCCCGCGGGGAGAGGGACTTGTGGGTTGTGGGCTGTGGGGGGGCGTGGGGCTGCTTTTGTGAAAAGCTTGAAGGGGGACGAGGAAAGGAGGGGGCTTCGGGGGGGCGCTTTCTGCTCCTGACCTGGAACAGACTGCCAGAGGAGGCCGTCGGCCAAGAGGGGCGGAGGGCCTGAACCTGGGCCAGGAGGCGGGGCTGGGATAGGCAGGACCCCACCCCCTGGAAGGGAGGCCAGCGTGGGGCAGGCTGGGCAGGTCCCCCACCCCAAATGCTCCAGGGTGGGGCGAGGGGCAGGTCTTGCAGAGGCTAGGCAGAGGCTGCTCTATGGGGAGGTGCAATTGGAAATGAGCAACGGTGCACAGTAAGTGTTAACCCCGCGCAGGTTAAATGTCCAGCTCTGAGAGCTGCTCCCTCACT

SEQ ID NO: 85 - protein, 1234 aa, Homo sapiens
TATTGAAGACTTTTAATTTGAGGGCTTATATCTTTGCATACCCTGCTTAATTTTTTTCCAAGTGTCCCATTGCAGATTGCAAGTATAAGTTAGTGTCGGAATTACCATACGAAACTCTCTTTCTAACTTTAATCGGTAATTTCTCAGCAATAGAAAACATGATGCTAATGAATAATGTACCCAAAAGCTCTTATTATAGGGTTGGTATGAATTCCACTTAATGACAAGCTTTCTCAAGCAGCAGTTGATTTGAAATCCTACTTTTCATTAGTGAAGTATAAAATGTTAATAATACCTTCCACTGTGCTGTTCTTTTGTAGCATAGCAGCATATATCTTCCCTGTTCACCATGGACTCTTTTTAAGATCTTACTAGTAACTTCCTATAACATAAATAAGATTTGTTCAAGAAATAAAAATGTGTGTTTTCCCATTGTTAGCTATATGTTTTTCTAATAATCACATCCGAAGCTTATTATACAGTAGTAGCCTTAAGATATTATTTTTTTAAATATACTACTTTGGTCTTAATACTAGTTTTTAATCTCTTCTTGTTTCTATGAAGTCTGAATGAGATTTTCAAAATTGAATAATAATTTGATCCGTTAATCTTTTGAAGCTAGTAATTTTATTTTCCTCTCTTTGCAGTCTCTGAGGTTCGCAAATGAATAGAGCTTCATTATTGCAGTCTGCATTTAATAACAATTATCCATTATCTTGTAATTAAGACTCCCTGTAACGAATCATGAGGACAATGCAAAAATACATAGTACATTTCTTTAATGAACTGGAAAATGTTCATCTTGTTCTATTTAGTAATGAGTTGCTGAATAGTCATTAAATCCACTGGAGAATAGAGCTAGATGGATTTTGAAGACTGTCTTGAGTTTGTGGTTAATCTATTAGAATTAAAATTTCATCTTCTATTTTTATCAACAGCTGATTAGAAGTCATTCTGTTTGACCAAATTGATTAGAAGACCATATACAAGGGCAGCTGTTGTTTAATGAAAGTTTTTAATGAAACTGTACCATGGAGACTTGTAATTATAGTCCTTAGAAAAGCTTTGAGTTGCCTTAGACCACAAAAATAGTATTGTGCTAAAGATTTCAAATTAGGAAAATAAAAAATACAATTTAATATAATACTATAAATTTATTATTAATTTTAATTTCAACTAATCACAGTTGAATATTAGTCTACTTAGTGTGTTCCTTTTGACTTTTTCAGCCCTT

SEQ ID NO: 86 - protein, 1050 aa, Homo sapiens
ACCGAGGACATGAACTAAAAGAAAGCTACAGTGTTCCTTCTCTTCTGGCTTAGTCTTAGCATTTTGTGGGAGCTGCTTACAGAATCAGGAATCAAAAGAAAGACGATTTGGGAGCTTATTTTGTAGAGAGGGATGGTTTAGTAGAAGCTTAGAAAGGGATACACTGGCCTTGTGTTAAGCCCTACAGCACAGGCATCACTAATTATTTATATCCTGCTGTTAAGCGTAAAACAGGCTTGACTGCCCTTACAACAGCTGCAGTCTCACCACGTGTGCAGCACCATGAACTTTATGTGTGAGCTCTCCTGAAGAGCTATCGGGGCACGGGGCACTACAAGCAGGTAGCATCGTTGTCAGAAAAGCCTTCTGAAGAGTCCTGGTGCATTGGCAGCAATTAATGCAGGTGGTATTTTAGACAAGGGAGCTAATGAGTTTTAATATGCATGCAGGTGAGGGAGTGCTGAATCAGGAGAGCCATTAATGAACCTATGACAGCCTAATTAGCTACAATTTAAAATCTATGGAATCTAATCAGAAGAGCTGAACGCTGCTGCAAATCTGTGTATGAATGAGTCTTTCTAAATACTCCAATCTGTTGCTTAGTCACTGATTGATAGTAATTGCTTTTTTTCCTCTATTGTGCATAGGAAAATGCCCAATTTTGCTCTGATAAGGGAGGACACAACACTGAAGTTAAATGCCTAAGATGTTTAGCTCCTTAAGTTTAATCAGTGAGTGTTTAAAAAAATCAAAGTAAAATTAATTTGAACTCTGAATATAGATGATTTAAAATATACTACCAACTTCTTATATATTGGGTTGGCAAAGACAACATAGCTATTAACACCCGACAGCATATCTGAAAAGCAAGCAAAGATGCTGAAACATGCAAATGCATAAAATGCATTTATTAATCCGTAATTTGTTTTAAAAAGCTTTATTTATGTCATCAGAGATAACAGGGCTACATATTTTATTGAATACTTGAGATAATGAAACAGCTTTTTGAGGTTAACACAATCTATTAAGCATCGAATTTTTATGTGGCTG

SEQ ID NO: 87 - protein, 1195 aa, Homo sapiens
ACCTTCCCTCTGTGGCCAGTTTCGAAGACTATGCCAAAGAACGGGGTAGAAAAACTAGCAGAAGGGACGAAGAGGGAGGGGGGAAGAGAGTGAAACACAATAGATTATGAATTTGAAAATTGCCAATTATCTTGTATCATACAGCTCAGAGCCCTGGCACAATGATCAGCCACAATCCAGATTTTTCAGCTTAAATGGCTTTACATTCAAGCAAGCAAATTAACCATAAAATAGAGGAGGGGGGGGAACAAAATATTCCAAGAAAGAATAAACCGCAGATAATAAGCACCAATCTGGTGTTGAATGCAGCCCAAGATACCAATTGTTTTAAGTCACGACAAAGACAGCTGAATGCTCATCTTGTGGATGCAGAGCGAGGATGATTGCTTGCCATGAGTATCTTCTCTCACAAATAACAGTTTTTTCGCTCTTAATTTTCTGCTAAATTGGAAGCTAACTGCTTCCCACATTGTCATCGGAACACCTGCAGCTGTGCTGGATTTCTGCGCACCATTTCTTTTAGGTAAAACAGCACTCCACTTCCTTCAGCTCCTCATTATGCCGTGAGGTCTTCTTTTCACTGCACTGCAGCACTAATGATTCAGGCAGGCTGGTCAGTCATTAAGTGACAAGCAAATGATACCGTGTGCAACGTGTGAGTAATCGGTCTGAACAAATGAAATCACAGACTTGCCTTTCCCATCATTCATTTCACAAACAGTAGCAATGTGGTGCACAGCAGGTAGTTCAGTTAAAACCAGCCTTGTAAAACAAATTTCCTGCAGCCGTTTAAGTGAACTGCGATGGGCTGGATGCTTCAGCTAGTGGATTGTGCCCGGAGGAGTTAAGAAAGGTTGGGGTGGAGGGAGGAAGGGAGAGAGGAGCTGGGAGGAGAGCCTCGGTACATACATTAGAGTAATTAAGGGTTTCGTGTCTTATTGGTATGTTTTTCATTTGCATGGATCTCAGAAATGACTGTTGGATTAGCAAACCCAAAACATACAGCATACATTTCAATGTGCCTTGTCAGGAGGTAGCTGTTAAGAGACTGAAGCAAAGTTCCCAAATAAATGCTCTAAATTTGGAGTCATGAAGACGTCATTGTAAATCAGATGGACTGCTAGGAAGTTAGTGATGCAAATCACAGTGATAAAAAGCTTCATGGCTTTTATTTTCACAGTAGATCCCCTTTTGG

SEQ ID NO: 88 - protein, 1661 aa, Homo sapiens
CCCCTCCAGAAGATTCCATTCATTTAATAATGATAATAAAAATTACTGCCATTTATTGAGCAATGTCTGTGTGCAGCAATGTCTGCGTGCTGGGTGCTTTACATGCATTTCTTTAAAAAAAATTCATGCTTTAAATCTAAAGTAATATATACTTATTGGGAAAAATAATATAATGCTGATGACATATTATTTCTTAAACTTGTAGCAATGCTCCAAGGTAGGTATTTTAATTCTCAATTTGCATATGAGGAAGGTGACACTGAGAGGTTAAGTAATTTGTCCCTGATCCCATAGTGAGTGACACCCCAGGCTGTCTTTGCTTCAGAGGTGGCAGCAGAACTACTCAACTTAGGCAGAGAAAGTAGTGGAAATGGTTGATTCAAAGATGGCAAAACCTGAGCTTAAAAAAATGTGGTCAGGTCCAGAGTGACACTGAGTGGCAGCAGAGCTGTGGTCAGCACTAGTGTAAATATTTGTAGACAACCATGTTTTACAGACTTCAGTTTAATGGCAAAAATCTGCCCTAAATGCCTCAGTAAATATATGCTGGAGAACAGAAGCCTATTCACTGAAGAAACAATTGACTTTAGCTTTTCTGTTGTTAAAGTGGCCCCTAGTGATAGTGCTGCAGTGACTAGATAGAGCAGAGGAGAATGGCTTCCTCCTGGCTGGTGGGCTGGCAGTTTCACTGGCACTGCCAAATGTACTTCCTATTTGTTGTGCAAGGGAATTGGAACAGTGAGGCATTTATCATATCATCCCCTACTCCTCATGCAAGCAAAAAAGGAGAAGTTGTCAATGAAAGAAAAAGAACTGTAATCGCACATTTACATATGCTTCTAATTGTTGATTTGGGGATTTTCTATGAATATAGCTTCACAAAACAGATGCTGTTTAAGAAAAGGGGGAACATAATTTTGTGGGCAATGAATTAAGTGTTTTTGTGGCCCTCTCATCCGTAGCTAGGAGCAGTTTGTGGACCGCGTCTGTGAACGCGGCTCATAATTGTTTTTCACACATAAGTTATGCAAATGAGCTTTTATGGCAACTGGCATAACAATTAGCATCCTCCAGCAATATTTTAGCAGGTTAATTGCAAAATTTCTAAATTGTACATCTGACTTGTTAATTAGGCATGACAGAGGTGGTAAAATAGTTATCTTCAGGCAGTGGCAGCCAGGAGCTGCTTGAAATGCAAAGAGCAACGATTGATTGGATTTGAGGGTTACAATTGTGGGAGCACTGCTGTTGTCAAGTGCCGCTGAGCAGCTCTGCTCCATCAGTTGCCTCAGAGCAAGAACTCGGTAGTTGCTGCGAGGATCCTGCCATTTACAAATCTGCTTTATTTAACTCTGCAACTCTTCCATTCCAACCTATCTGAGCAGTTTATTTCACGCGGTTTGTTCTGCGTTGGGATCATTAAAACGAGATGGCAACACAAATTATTTTGTGCTCGAATTTCAGGACGCTGAAAGTTTACTTTCTATTTTAAAGTTCATCTCAACATTTTTCTCTTAAAATAGAAAAAAAGTCATAAATTCCCTATTTTAATTAAATTGTAAATTTCAGTTCTCAAGACTTCATATGTGATTATTTGCTTTTTAATGATTTAACTCTTTTAAACAGTGCATCTTTTTGTGCTTCATAGGTTCATTGCAGGA

SEQ ID NO: 89 - protein, 886 aa, Homo sapiens
TAGACTTTTCCCGGTGTTTTCATCTACATAAGGTGGCATGCTTGTTTTCTGATTACTCCCATGATCCCAATGCCTTGTCCATCCCTGGGGACAAATCAAAGAAGAAAAATAGAAGGTCATCTTTGGGTCACTGCTATTCAGTTTGCTGTGCCAAGCTGAAAACCAAGGCCATTAAATATGAAAATCCACTCATTGTCTCAGGCTTGATTGTATCCTGTCTTTCAGATCAGACTCACCATAGTCATAGCAACCCTAATAGGCGGATGTGCATTGGACCACATCATTTGCAGGGTGTCTTTAACTGAGAAAAGTTTTGTTGAAAATATGTGTGATTAATGCCTTCAACTATTATCTCTCATTGAACAGACATGAAAGGGGGCTACTTTGTGAGCCCAGATAAGCCTATTGCATGGCCATTAATGGCATATTCAGCCCTTGCTGAATTAATCTATTATTGCCTCTTGTCTTTGGTAACCATAACATGTTGTTGGAAGGCTGTGCAAAATTTGAGTAACTGAACCACAGCTCCAGTAATCCTTTAGACCTGGGTGTAAGAGAAGAGTGAAAAGCTGTTTAGTGACTAATTGAGTGTGCTGTGCTGTTTCATTAGTATTAAGCAGTGGTTCTTTATTTTAATCTGTTTATATCAGAGTGATATATCACCTTAACATCATCAGTTACTCAGCAAGCTTCACACAGTTCCTCTATCCATAAATATAACTAAAATAAAAGATCAATAGAAAGGCTTAAATCTTGTGTATGTGTGTGTGTTTGCGTGTGTGTGTTTGTGTGTGTGTGTGTGACAGAGAGAGAGAGAGAGAGAGAGAGAGAGAGAGAACCAGAGAAACAGAGAGAGACATAGCACTCAAAGCACAAACAACCAAAA

SEQ ID NO: 90 - protein, 1119 aa, Homo sapiens
GAGGCTTCCCAGAAGATAAGCGAAGTTTCATAATCATTTCCCTGGTTTGAACTTAGAAAGAAATGTAAATATATATTATCATTAAGTGAGTTGTGATTTTAATTACTGGAAAATGTTATTAATTCTGATAAGAATTATTCAGAAGGTAATAAAGATAAAAGCTGTCAAAATTAATTAAGCACATATTCATTAAATCCAAGGTAGCTTCAGTTTCCTTATTGCATAAATACAATTAACACTTAATCTGAATCTCGATAAGTTACATAATCATGTGCCTCAAAATCAAGGGAGGATACAACCTTGGCCTTCTCCGTTTTACATGGGAAAACATTAATGACGCTGACATCGGAGACAATTAGACAGTGTCAGCCAATTGTTTTTAGCCAGCTTTCTCTCACATCTGTGGTGTCTACAAGCAAGAAGGCTCATTGTTTCCACAGGCCTCCTTCGGGCCTTGGCTTTTTGTGTAAACCGTCAATCTCTTGGCGAATATCAAAGCCGTGAGGAAATTAGAACAGACCAGCTCTGCTGCCCCACACTAAAGCTTAGCAGGGTGCATCCACTATGCTACTAATTAGGCAGTGACCAACAAAATAACCTGTCAATGTCCGCTAGCCATTTCCCACACACCTGCATTTCATACCCTAATAAGCATACAGCAAGAGAGAAAAAGGGATAACTGCTGAAGTGTGAAAAATGAACAAAATATAACAATGTTTCCATCCCCACCTATACTTCTGGCAATTACCATTTAACATTAGGGGGACTCAACATGTCTGAAGACTCACAATACGGTATCTGAAACTAAAACCCAGGGGGGAAACCACACATTGAGACTGTATTAAGGTTTGCTTCGAAAATATCACACTAAGAAGAATCTAGAGTTATGTATAAAACCCAGGAAACTGAAAATGACCATAATTTAGATTAGGGACCAGGAGACTGACTTTTTAAAAACATTTTCCATTCAAGCCATTGAAAGAGAAATGCGTACTATTCTCTTCATCTTTTCCTTCCATAAAACAAAAATATATAACAGGACAGAAAATAGAATATCTGAAAAAAAGTTTCATTTTTTTCCTTACATTTTCCACTCTGATTTAGTGAATTTATGATCAT

SEQ ID NO: 91 - protein, 1274 aa, Homo sapiens
CTCAAAGTCTCTTGCACAAGTCCATTTGTGTAGAGAATATTTTTGAGTCTACATAAGTTTTTTTTAATTTTATTTTATTTTGACAGAAGTTTTGTGGATGTCCCCTGAAATAGCTCAATGGTTAATTTTTACTGTTCCTCTTGTAACTCAGCTGCTACCTTTGTGTGTGTGTGATTCTTTGCTTATATGGCAGCTCAATTAGTGTTGTTTGTGTGTGTGTGCTCGGTTTTTTCTAATAGTCTTATTAACAAGAAAAAAGGTGGCGAACAGGTTATTCTCTTAACCTGACCTGGCTCTAAGAGTAAGATGAGCAGCACTGAACAGATGTCCCCATTTAAGCCGTTCTTTTCCCACATGCCTGCTGGATATTGCAGGCGCGCAGGAAGCTCGCTTCAAACCTGGCCCATTTCAGGCCATAATGGCCACGTTATTTCGGCCCAGTGAACACGAACAAAATCGCGTGCTTTAGAATCATTCGACTCTGAGTCCAGGAAAAGCAGGGGGTGTGGTGGCAGTGGGGGTGGCTAGGGAGGGGTGTATATGAGTGGGGGAGCCGATTTCATCTCGGATCGCAGGAAGAGAACTTGCTCAAAAGAATTTTTCCCCAGCAAAAGTGGTATAATTTACAGCGCAACTTAATAATCCGAGGGGCAATGCAAAAGCCCTTTGCGTTGTAAACCGCTTCTAATTACCTGCCAGAGCAATTAGCTGACTATCACGAAGAAATTAGATCGCTCAATGTAGCATAAATAATGCGAATAATTTTGTAAGAAGAATGGAAAGCGAGACCTGGTGTTTCTTTATAAGGAAATAACACCTCGTACTGTAAGAGCCCTCCATGAACACATATTAATGTCTAGGCATGCATGGCAATGAGTCCGAGCAGGAGCCCTCTGGCTGCGGTTCAGCACTTTTTCCGTTTACGTATGCGGGGTGAAAGTCGGCTTCCAGGCGTTCGATCTCCAGCCTTCCAGCTCACAGTAATTAACACATAGCGACTTCAATGGGAAAACCTGTTTTCCAGATGATTTTTACAATGCAGCTTTATGTCTCATTTGGCAGTTTAAATAGCTGGAGTTGTTTTCTGGCTTCATCTCTACTATCATCTGTTGAGCATATTTTGCTTAGAATATTGAATCCCAACCAAAATTTGGGTGCAGGCTTTTGCTGACTTTTATTTTCTTAAGAAGTGGGGATATCAGGAGCCATTTTGAAGGATACTAGAGCAAAGAATTCTTGTGAGGACCTGCTAGTGCCAGCAGATATTTGAGTTC

SEQ ID NO: 92 - protein, 1226 aa, Homo sapiens
CTAATGGGCTCTTTCTTTTCCTCACACAGACAGGGCTGCTCTTGCCTTGCTCATGGGGAAAGACCAAATCGCTTTCTTTGTTTTCTCCCCCGGGGCAAACAGCATCCTGCCCCGTCCACCTGTTCTCTCCCTGTGGCCCCTAAGGTCTCGGAGTTTGGTGTCTTGTATACTTTGCCTTAGAGAACAAAAGACACACTTTGTTGAAATGTCATATGTCAGCCGCGTCCTTCGATTCTATTAAAACCCTTTCTTTCTTTCCTCTTTCTTTCTTTTTTTTCTTTTTGAAAACATTATGGGGGAAAAAGGAGAGAAAGAGATCGAGGAGAGCAGCCCACAAAAAAAAAAAAAAAAAAAAAAAAAAAAAACGCAGCAAACCCAAGCCCCACTTTGGGGAGTTGAAACATCTGCACTTTCTCAGCAGTTTGAAAGGAAACAAAAAATTGCCAAGTGGTATAAAATTTGAAGAAAAATTACCCAAAGGAGGAATGGACGTTAACCACGCTTCAATTCCCCACTATGGGTTGACATTTGAAGTACTTTCTTCTCTCCTCTTTCTTTCTGATTCACAGTGTGTCTAAAGAGGTGAATTGGGCACACAAAACCCAACCTCCTCTTGCCAGGGTGGGTATGAAATATGAAAGCTAGACGATTGTCTGGGCTCAGTGCATTGGAATAACATTGGTTAAATTATGGATAGTTTTTGAATAGTGTCACTTTTTTTTTCTCTGCAGATGGTTGTTCACACAAGGAGCCGGGTCTGCATAATTGTATCACTAATCAGCAGTAAGGCAATTAGTTGTGTAAGTGTGCTATAATCATTCTAACAGAAGAGATGACGAAAAGACAAAAAAAAGGAGGGGGGGGACCAAAATGTCTTTTCTGAATCCATCAACTGACAGCCATAATTAGATATATATAATTGAAAATTCCACAGTAGGGGGGCCAGCTTGTACAAATGAATTTTCTCTGCTGCCCTTACGCATTTTTGTCTGTGGCTGAGCATCCCCCTTAGGAAAAGGCAGAAAACTCGTCATTCCAAAAGAGTGCATACTGTACTGGGTATTCTTTCAGGCCAATGATGTCAGAATAACAATTTTTTTTTTTTTTTTTGGTGTGGGGGTAGGCATGGGCTGGGGGGGGACTTGGAGGTTAGTCTGCTGTGAAGACCAGGGCTTCGCGTAAGCTGATATGAAATGCCTTGCTGTGTCGTCGTTGCTGTTATTTTG

SEQ ID NO: 93 - protein, 1283 aa, Homo sapiens
TGCACGCGTGTATGTGGTGAGTTAAGCTGTTTGGCACTTAATGGTTTGGACCTATACCAAAGGCAAACCACTGGAGAAAATACTTGCCATTTCAAGGACTGCATAAGGTGATGGAATTTCCTCTATGAGGCATAAATTTCACTCTTGCTGCCCAGCTGGCTGATTGTTCAAATTCAGATTCAACGAACACATATTTAGAGAAGGAGGGAAGAGGAGGAGATGAGTAATATCAAGCTGTGCAGATAAGAAGGCCAGGGCTAAGTCTTTGAATTTGTGCACAATAGAATGAATACCTTTTATCCATTCGCCCCACTAAACACCACCACCAGGAAAATCATTTTCCAATTAGTCAGCAGGTTTCAGCGTCATTACCTTTGAGATCAGATTTGCTACCATTCAAAAACGCATCAGAGGCAGTGGAGGAAGAGTTAAGCATCATTCCTGGCATGCGAGGTCTGGGAGGAGGTGAAATTAGATTAGCTGCAGGAAAACGGGAGGGTTTACATTACCAGAGGGGCTCTACCTGGCTCCAGGCTTAACAGTGAACAAGGCTTTCAGCATATGGCATTACAATGGATTAGTGATCAAGTACGATTAATCCTAATAGATCGTCTTTTGAACCTCAGTGGCTTGTTAGGTGAGAAAAAATTGTCTGTCCCCAAAGTGTCAGGTGAAACTCTCATTTGAGGTAAGACTGCCATGTGGAGATGGGTCTCCATCTGGTGGCTTCCTTTTGTGAAACTCCACCAGAAGGTGTTTTAATGAGGCTTTTATAGCAGGCACCACCTGCCACTAATCTTCCCCTCTAAAAAGGTGTAATTGAGGGTTGGTTTTACAGTATGGCTCATATCCTAACCTTGGGAATTCATCAAGAAATGCAAATCTGGGTGGGACGGTGTAATCATGAAATGCCATTTTGGCTTTTGGTTTAGACTGAAGTAGTTATAGAAATTTGTGGTGGGCTAATTACAACCAGCTATATAGTAGCTTCCCCTTTTCAGTTAGATCAATACGTGTGTCATCTCAGAATTAAATAACCAAGTTGATGGTGACCATATGTGTTCATTCAATTTTTTGCACATGTAAAGAGTTGCAAGGCTGCTAGTGGTTCACACAATTTAAAGGTTTCATTTACACTATTAAGGTTTAACTGGTTTGAATTCACTGCACATTCGTCCTCTTAGTAGATGCTTCAGTTCTACAATGCATTACTTCAATGAGACATGAGCAGATTACAAAATCACCGGCTCATTTTCTATCTATGAGACCTGGGGAGTAGAGGT

SEQ ID NO: 94 - protein, 1740 aa, Homo sapiens
AAAGGACAAACCATGAGAATCCTGATAGACTATACTTGAAATAAAATAGGAAGTCCACACAACTGAAGGTGAACAAATAATGCAGGCTGAAATGAGTATCTCTTCGAAAGACTACAAGCTTCCTTTTGACATTCAAGCAATTCAGTAAGGAGGGAAAGCGAAATTGAATTTAGCCGATGCAAATGAAATTAAAACTAAATTGGTTGTCACATCAAACTGATGTTAACTATGTAAATGTTTTCTGTTTATGAAACTACAGTTTAGAGTATATAATTCTGCAAAAATAAGAATATTTTTGTGTTCTTTTAAAATATAAATTAAAAGGGCAGATTATGAAATTGTTTAAAATCCTTGCCACTTACCCACGTAATATCAAAGGACCTATGAATCATGAAAACTGTGGACATAGAGTATTGAAATAAACATACACATATAGATATGCACATCAATACACATGCATGCTTTTCTGGCCAAGCAGTACCCCATTACATCATTGCTTCAAATGCATTCATTCTCTTCAATATTGTTGGCTGTTTCAGGTTAACTACCAAAATCATTTGCCTGAGAAGCGAGATTTAATTGTCTTACAACTACCTCTGTGAGGTACAATAGGGATTACAAGTACCCATTGATTATACTATTGGGTAGAATAAGGGACTCTTATTCTAGCATTTCTCATTCATTTTGTCATTGCATTCTCTTTGAAAGAGACCAAATGGGTCCCAGCAGGTGAAAGCAAAGAAACCTGAAAGGCCCCCTTTGATGAATGACAATACCACAACCACCCTCCCCCCCACCATTTTTGGAGATTATAAAACCTTATTAAGTCATGCCCTGTTAGATATTGATTGAGAGGGAGCTAAACTAAAACCAACAATAGCAGCATGGATCAGAGAACACTGCTTTCATCAATGGGCACTAAACACAGCTAAGCTTTCCAATCTTTTCTGGGGGGGCAGGGTGGGGGGACTTTTTTTTTTACTATTTACTTTTGTTTAAACCATTATCCTAGAAAGTCATACAATTATAGCTACTTTGTCAGTTAAGAATAAATCGTAGTTGTCTAGCACTTCATCTTTTTGAATGTAGCAGTGTATTGCACAAACAATATTATACTTGGTTAAGATTCAGGATTATTATTATGATTATTGGGGGGTGCAATTCTGGGTAATTATCATAATTATTCTTGACTCTGGGACTCCTTTGATGACAACGTTGCTTTAAAGTAAACCACTTGGACATAAAACCCAAGATATTTGAAAAGAGACTGCTGCCAGAATCAGAGTTGAAAACTCACCCATATTTTAAAGCTATCTTGATTATCAGGCTGTTTGCGTTCCTGGGCTGTCTTTTCTGCCATCTGTGAGCGCCACAGCAAACAACCCCTTTATGACAATCACCTCAGTATAACTTGAATATGTCTGCTTTAGAGGAGACTTCTGTAATAAGACTCTGTGCTAATTAACTGTCAGCCTTTTTAAAAAAATAAATAAATAAATCAGCAGACTGCATTTTAGAAAGACACTCCACCAAAAAATTCCCAAACAAGATTTAAGTTTATGTGCCAGACTGTAACTTCTACTCCATGTTTTTTCAGGCCTTCCTCTGAGTAAATCTGTTTACTTTAAATACTTCTCATGTGATAAAGGTTTTCATTTTTCTTGCCAGTTGACTACAGGTAGTAACATTTGCTCCTCCTTCTAAACAGCTACTTGATTCAGTAACGTTATCCTCCAAAAA

SEQ ID NO: 95 - protein, 673 aa, Homo sapiens
CCCGGCATTTACAGCCTTACTAGGCGTGTAATAGCAGTTGACTCAAAAAGAAGGGGTTTTAAATTCATTTAGTTAACTTGGGCTTGACCCACGAAAGTTCCCACTTAAACCAAGAACTTTAAAAGGCAGCCGGGGCTGGGGAGGGGGTGGAGGGAGGGCGGGCGGGGAGAAAAAGCCGCGGGGAGAGCGAGGGAGAGAAAGAGAGAGCGAGAAAAGTTTCTTTTCTTTAAGATGTCTCAAGTTCTTATTCCTCATTCATCAACCCGCAAACAATATCTTTCCCTGGCTCTGGCATCTCTGCGCGTCGCCCTCTTTTCCCCCTTTACGATTTCTGTTCCTCTCTTAATTTACCGTGAAGACTAATTCCACTTCCATTCACGCTATGTCAACCATCTAATCCCCCTTTTTTGTAAGGGGAATTCCTCGGCCCCTTTTAAACAAGTCCCCTCCGCATTGAGCTACAATTTACTGCTACAGCATTCTTCCAGGGCTAATGAATTTAGAATTAGCAATTTCTTTCGAATGGAGCCGAATGAATGCGATCACTTTAACAGCGTGACAAATTGCCCGCCGCGCCGCAATGGACACCGTTTAACCCCCCCCTTTCAGCCGGCCCGCTCGCCGGGTATTTTCCCAGGTAGCTTAGAGGGGAACCTTGTAAGACATGGAGGCC

SEQ ID NO: 96 - protein, 970 aa, Homo sapiens
CTCAATTGATATTTATATGTGTGCAGGTCTATCAACGTTATTGAAAAGTTAATCCAAAGGATTTATTGATTACTCTCAATTTCTCAGATACTGTCAGTTCACTTTTGAAAATTATTCTCTTATGTAATATTGCACTCTTTTCAGTAAAAAGGAGAGTTTGTGGCTGTTAAATATGCATGAGGCACAATAGTTTCACAACAAATCAAATTTAATTAAATGATGCATTTCCTCCACTTACAAAAGGTTTATTAAAGGTTTATTTGCTCATGCAAATTAAAGTGTTAGAGTAAAAATCCACATGAAACTTGGCACTAACAATTAAAAAAATATTGAAAGATTTCTCGCCTCGCTGCAATACCTTGCTATGTTTAAACTGCTCAGCTTGTCATTTAGAATCTTTAATGAAACCAGGGAGGAGGCTATTTATTTGCATAATAGGACATAATTTGCTGTGGTGAGGTTTTAATTATTTATAGGCTGTCTGAAATATTTAAAATGGCATCACTAAGGAGCATGAAGTGTTGGATAATGCCTTCATTTCAGGTTTCCTGCCGTTTCTTTTATGGGTCAAGCGATTTATTTCTAATTAGCATACCAGGCTAGTGGCTTTAAAAACATAAGGAAAACAAATTGGTTTCAGTCTGTTTGCAGCTTGAGTAGTTGGAGACGGCCAAGGGTCACTGACGGAGACTGAGCAGAGTTAAGAGATGAAGCCAGAAGCCATCCCAGCACATGGAAATCACTGACTCAACAGAGCCATACTTTCATTTGTGCACACTGATTACTGTATGTAGTAGCTTCTCTTTGGTAGGTAGTGGGTTAGAGTTAATGGATTTCATGTTAATTGTCCCTTAAATATTTTCTACCATTAACACATTTCTTATTGGAAATGATGTGTAAGCAACAGAAAATATTCCATTTCCTTGGATAAAAGATACAGTAATTACTGTGTGCATAGGGAAAAATTCGG

SEQ ID NO: 97 - protein, 2442 aa, Homo sapiens
GACATTGAGAAAGCAATTGGATTTTGTAAAACATTTCTCAGTCTAATAATTTCACATCTTGTCTATATTTTACTAAACTAAAATCAAGCATTTTCCTCCTTCAAATTGAGACAGAGGTATTTTGTTATTAGTATCGTTTCCGTATGAAATTAATTTCCTAATAAATTACAAGTAATCTCATCATCCCCTTTAAGAAAACAAAAAAAAAAACCACACAAAAAGGCCTTGAAGGAACTCTTGGTTCTAGGCACTTGATAATAATCCAGTGATGAAAAGGTCTGGGTCCAGAGTGCGTGGGTTTGGCGTGCTGTTTGTCACGGTTTGGTTCTTGTGCTGGGCTTGGTGTTGTTCATATGCCACCCTGGGCTTTGGAGAGCTCCAGTTTTGCTGTTTGTGCTGGATTCACTGAAATTTCTTAGAGGCTTACATTTAAGGATCCCACTTACTGCAGTCACTCCTTGTGCTTTATTGCTTTTACAAGTGGTCTCGAAACCCGGTACTTGAGAATAAACATAACAGTGCAGTGCTGCTGTAGCACTTTTAAAATTCTTCTTTGCTCTATTTTGTCAGTGAGCTGATGAGCAACCTCAAAAAAAGAAAAAAAAAAAACCCACTGGACCTAAAAAAAAAAAAAAAAAAAAATGGCTTCCTCTGATGTCCTAGAGACAATAATTATGATGTGCTAGTTAAGCCCAAACTACAGCTGAGGGATTTTACTTTAAAGCAGCGGCTTGGGCGCAAAAATGCATTTATAGCTCTTTGTCTGCACCTCATTATGTGTGGGCCTGATTCATTAAGTAATTGGTTTGCAGTTGTTTACATGAGTATTAAGGCCTTCTTTTCAGCCGCCTTTGAGAGATACATTGTGCAAATGTTGCCTGTGATGAATGCAGAATGAGGGCCAGAGGGTCCGTCCTATTGGCTAAACAGTGCACTCCTGTTGAAAAGCCAGAGAAAGGGATTGGGTGCTGCTTTGCATAGCAATGACTTTCTTAATAAGCGTTACAGATTAATACACACAAGCTATAAAAGATGCAAAGAGATACTCTTAGCACATTTATACATGCTCATTTCATTGTGATGGTGGTGGGGTTCGGGTGCTTTCATATTCCGTTTTTCAGAGCAGCAGCTTCAGTGCATGAGCCGTAATAGAATCCGATGTTTATTGTATTATAAATCACGGGCAAGTAGGCAGATTGGCAACAGTTTATTATTAAAGATTCTTTCAGTGTAAATCTTTTTCTACCATTGTATTTGCTTCAGCAAAATCATTTTGTGGTTGAGTGGGGATGAAAAGCATAATGTACGAAGGAGTGAGTCCTAATAGGAAGCCGTTCTCCAAGTAAAGACCACTTGTTCCCTTTTGTTCAGGGGTGCATGCCAGAGCTTCCTCTCCTCTGCAAACATTGTCTCGCTTTACCTTCCCCAGCAAGCGGTTTTCACTCTCCCGGATCCATTTGTTCAATGGAGAGTATATTTTAAAAGCCTGCCCTTAGCTTACTGGTTCCTGCCTTGTAACTTCAGCTTACTGGTTGGACCAGATAATGTTTTACCAAAAGGAAAGGGTGTGTGCTTGCAACATAATTGCCTGGGGGAAAGGTAGCAGAAGTCACCCCGCCACTGTACCCTGGCAGGGCCACCGTGGGTGGCATTCTGTGCCAGCCTTGCAGCCACCAGAGCGGCCAGTGGAGGGCGCCAGCCTGCAGCTGATGCTCTGATGGCGGTGGCATTTTCTGTCTTTGCCTGGTCACTGTGCCATTTTCCCCAGGATAACATAAAGATTATAAGGAACCAATAGTCCAGTGAAATAAAAATGAGTTTTTCCTGAAAGTCCTTTAGGTTCTTATATAAAAGCACTCTTCTCTGTCTTGGGTTTGGCACATCTCCATTCTTAAATTCCACTGAATTAGCAGCTTCCTAAATATGTCACGTTTCTTATCACAAGCCTACATACGTTGTTTTTTCTGCACAAAGCAAATAAGAACAATCGCTTGATTATTTGAAGAGAAAAAGTTAAGTTGACCTCAGGCAGCTGAAAGTGGCATCTTCTGTAGGAACCCCGATTAACCATCAGGGGGCGCTCAGACTTTGTTAAATTACTGGTAGGCCTTTAAAACCTAAAATTAGTGTTTACAGAGATTTGTTGGCATAGTCATTGGGATTTTTTTCTTTCTGGATTATTTTTTGCCTTCTGTTTTTCAGAAACATATGTCTGTTTTGAGGAACGTTCAAGCTGAAATTGCTCCTTTAGAAATTGTAATACTGATTTCCACTAGCAGTCAAAAATTATTACAAATTTTAGAATTTGGAGTCTAAAGACTATGTCTTATAATAAATTAGCTATTTTCAGCCTTCTAATAAGACTCCAGAACTGGAAGGATACTTCCTGCTGCCGGGAGCCATTCCTCCTTATCCTGGACATCATAGACAGTGCTCCTGGCA

SEQ ID NO: 98 - protein, 2258 aa, Homo sapiens
CACCTCTGTGCCTAAACTCCCTTCTTGTCTTTAACCTATAAAAAGATGTCGCCTTCGATAGGAAGATTTGGGGCCAGACATCAGAAATCCACGTGGGAGAGACTGGCCGTACACTTCCAGATGGAACAAGTCTGCCCAGTGATGTGAGTTCCATCTCTTTTTGATTCTGGAACTCCACTTTCATCTTATTTATGCACATGGAGATATTGATAAAGGGGAAATGTATCCAAACTGAAAATAATTGGATCCCTACAGCTAACTCTGAGATATTAAAAGCAGTACCACTTGGCTGTGTCTTTGTCTTGTTAGGTTTGATCATAAGATCACAATGTAGTAATCTCGGGCTCAAATTTCTGGCATAAAGATGCACTGTTCCAAATGTGGCCTCAGGGAACACGACTGCCCACACAGCCCCAGGATTGTCTCATCTTATTATTTTTCAACAGTTCTTGGCCTGCTGAGGTCAATGTTTTGTCTCTTTTGAGTGTTCCTCTATGCTTGACACCTTTTCCTATTTTCTTTCTTAAAAAAAAAAAAAAAAAAAGGGAGGGGGAGAAAGGAGAAAAAAAATAAAAAAAGGACTTTGCCGCGATGACCAGAGTCCATCTGCAGTTGGGTGGCATCTGCTCCCCACATGTCACTTTCCTCATTAACAAGCAATTGAATTAATTAAATGCTACTCAGAACACGCATAACAAGCTACCGGCAGTGTCCAAATTAGCACTGATAATCAAGGATGATTTCCTTTATTATCCTGCTAAGTGGTGTGCAGACTCTGATCTCCCTGTCTGCCCTCATCTATTTACATACCCCCAGCTCCTGCCTTTGGAAGCGGAGGTTATCTTACCTAGTTAATTTGCCACGATCACCGAGCATGGCGGATTGATGCCCTGCCCCTGCCGCCACTGCCGGGCCCGGGCCCCCTCCCCGGCTGCCCTCCCCCAGCCCCAGCCTTTGTATCTCAAGCTCACTGATAAATTAAAGGCCACCCCTGTGGTCTCTCAAGTGAGTAATAGAGGCAGAAATTTCATTTTGCAACTGGCTGATTTAATGATCCAAAGGGTAATTAATGGCCTGATTATCTTAATGTTAAATATGTCCGGCAGCAATTACTGTGACCTCCCGCTTGTCAAGGTCCGGGCTGTGCTCTTCTTTCAATTAAGTTCTCTGGGGCTTAATGGTATGAATAAACTCCTCTGATTCTATCATCCCGGATGCAGAGGGTTCAGGGAGCTGGGGGCTCGTTTGGAGTTTTAATCAGCCTGTCTTCTACTCCGGCGATCAGAGTTAACAATTATAGCAAGGACAGTTTAACTTTCTTCTTCGCCGTGCAGACCCCCCTACATGTACACACATGCACACTTTTGTGTGTGGCTTTATGTGCCTTGTTTTCATGTGTTTCTTTCAGTGCTCTCAGGGAGAATTCTGTTTGTGGAGGAAGCTGCTGTGCTCTGTGAGCCTCGTCTCTTCCAATATAAATTATCATGTGAACGCTGTGGTTTTTCTATTTGACAGGCTTAATTAATTGGCAGGAGCCCCCGAAAATGACAGTACCACTAATTGCAACTCAAAGTGAATTTCTGTCACCGCGGCGTGCTTGTCAGTGGGCCTGCCCTGGCCCCAGCCGCAGAGCGGGTCCACCCTCCCAGTTTCCCCGTCCAGGCAGGGACTGTGCCCTGCTCAAGCCACGACAGTGGCAGCCTTCTCCGAGGAGCCGTGGGTTTGCAGGCACACCGTCTGCTGGCAGGAGTGACATTTACTACCAATAAAGTTTATACATCCTCGGCTATGCAAACGCAACAGCTGCTCAGGGACCTCAGCCCTTACTTAAGATATTTTAGCAACTTCTCTTAGCAAGCCAACTTGGAATCAGACTGAGAGAACCATAACTCACTTAGCCACCCTTCATGACTGGATGGTCCTCATTAGCACACTGCTAAATATGCTTCAGTTTACTAGAGCTCAGGGCCCGGATCAGAAATATTCTGCTATAAATATTAAGCCAATTAGGAAAATGTACAAATGAGAAGTACGTTAACACTGCCTTTAAAATAATACCTACAGATTACAGTTGACAACAGATAGAGCAATGCATCTAGTGAACCTCCACCAGGGAGCTTGGTGGGAATCCAGGCAAGCTCTCCATAAAGACTGGCTCTAATTATAAGAAAGGTGATTCTAAGAAGATTCTCCATGAGGTTAAGTATAATGGGATCTGCTTTTTCAAGGATAACTATACTTGCATTTGCCTTTGAACC

SEQ ID NO: 99 - protein, 2093 aa, Homo sapiens
GGCATCAGATAACAGAAGGAAGTGATTGCTATTATTGTAAAAGGTAGATAAAATTTGTTTTACTTTTGTGCTGTTCATCTAAAGAATTGCACAATATATTGAAAAACCAGATTCTTGAGGAAGTTTAATCGATCTCTTGGTTGTTAGGCTAAAAAACAATTTCTAATCGTGAAGAGAAGTTACTGTAATGTACTTTGGACTCACTATGTACAATTCTCCCTCTACCGCCAGGACTTACTTGCATTCAGGCTTTGCTCTAGAAGAAATAAGAAGACATTTTCTTTTAGCATAATGAACACAGCTGTTTAGTTCTTCACCAGTTAACATTTTCAAGTTTAGTCTAGCCAGGTTTTGAGGGGCTGTTCTCTTGTTTACATGACTGGCTAATCTAGACAAGAGTTTAAGGGTAACTATCCCTAGGAGGTACTGAGAGCCAGCAGCAGGATGGACAGAGGTGAAAATAAGGGAAGAAAATTCATCTACATACCCAGCAGGTATCAGTCATTTATATATTCATCTGTTTTCAGTTCTCAACTTGATAAGAGTGTGTCCATTTCATGGTGCCATGCAGAGAAAATGAAGTGTGTAAGGTCATTCAATAAAGATTAAATTAAAAACATATTCCTATTGCACCCTCAGGGTCCATTAGCCTTGATGAGTGTACAAATACGTTCTTTGTGTTATGTGCTCCATCCTGAAAGAGATTGTGTGCTTCGCTCATTATAAATGTGCACCTGAAAAGACTGAACATTATCCCCTCTTTTTTAACTGACCTGTGGCCACCGCTGGGTTCATTAGTGCAGAACATCTTTTCCACTGGCTGAGTCTGCCCTATTGTTTGCCTTGGCTAGGGTCAAGTCAAGGGCACCCAGCCTAGATTGGACTCATTTGTCACAGGGTCTAGCAACAAAGCTGATTTCAGCAGAGATGGGGTGAATTTCATGGGGCTGAAACACAACCTTTGACACCAAGTGCCCAGGGCTGCTCAGAGTTGCACAGATGGCCTGCCACCCTTAGGCATCCAGGAACAAAGAATTGGTGAATTATAACAAAAATAAAGTTTCCACAGTCAGCGTATATTTTAAGTGTTTAAATTATTTGCAGGGATTTTTGACAGTCTAAAATTGCATCTTGAGCACTTGTGATAATCGCTGTGCTTTTTAGACTATGAAGGAAAAAAACAATTCAGTTGGGGGCTTATTGCTTAACTGGTGTAACGGTGTAAAGTGTAGCAATTTAGTGTGGAGTGCAGGTTTTCCATGGTCAGCAGGAGCTGGCATGAACAATGGGTCGTGCTGAGGTAGCATGTGGAAAATGACTTTAATACACTATATAGAATGGCTTATTGCCTTGGTCAATAGGCTGCAGTGAAGATGGTGTATTCAGCCACTTGGGAAGGTTAAACCTGTCAGGGAACACTGTGACTGATATGCAGGGGCTGCTTATGAGGTCTCTAATGGAAAAACCTGACAAGCAAAGTTATAAAGGTTACACTTGACACATACTTCAGCATTATGCCTTATATTAATCCATTTTTTTAAAGGTAGGGTACTTTATATTTGTTAGAAATTGATGCCACAATAGTATTAACACTCCAGAGGAAACATTTAAACTTTGCAGTAAAGTAAGGAACATTATAGGATGAGATCACTGCCTGGGTAAGGACACTTGTCTAATATGCTAGCATCATATTTCTCTTTCTCACAGTAAATAATCTGCTACATTAGTGCCTTATTATTATCTTTCAGGATTCATAATTTTTAAAAACCTCTTCATGATATTTTCCTTTTGTATTTGAGGGAATATATATTATAATTGCATTATAATATATCCTGAGAGAAGGTTAAGAGAACATTGAATTTATGTTTAGGATGTTTCATCCCCTTCTCATTGGAAAAGAAAAACTACAGAATAAAATCCTACTTTTGCACTGAAATTTGGTGCTGTGGTCTAGTTCAATATAAGTGGGTGACCTGGAGTTTTCCAAATGATTTCCCAAGGATATTATTCCTGTGTTAGTATGGTAATTGGATATTATAAGTGTTCTTGATCAATTAAATATATATTGGTAAAAGTGAATATAATTAGGCACG

SEQ ID NO: 100 - protein, 1632 aa, Homo sapiens
TAACCTTTTCGTGGGTCGATTTTTTTTTCGGTTGGGAAAAAATTCCCTTAATGTTAGTTGTAGGTAATGTAAAGTTTATGTGGGTTATAAAAGCCATACTACATATACGTTTTTGAGAAGTCAAAATTATTTATTTGTATATCAACAACATAAATTAAATTGGGTTGTAAGGACGTGTAGTTGTATTACTTAATGTGAAGGCTCTCAAAAGGTGACATTTTAAAACTCTGGAGCGCCTAAAAAATGCAAAGGTCCTTGGCAGCTTTAATTGGGGAGGTGCCTAAACCTCTGGGAGGGGTCAGAGAAAACTCTGGTGGGTTTGTTTGTTTTTAAAAAGTGATTTAAAAACAACTGTGAAAGGAAAACGCTTAAAAAAAAAGAAGTCTTTTAGCTCCCAAGGCCCTGTATGTTGGAAGGCAACTCAAGGGAATAAATCGCTAGAGTCAATACCCCGGAAAAGACATTTCATGCCTAAATGAAAATCTTGTTAAATGTTATTAATTTTGACTTAGAGCACACAGCAGCCCCCTGTGCCTTGTATTCCCTTATTAGGGATTCATGTCTTATCAAATATCTAATTAATCTCCTAGACATCATTTGTTCTGGCCAACTTTATCTCAGCTGGTCCGCGGGGAAAACTCCAAATATTCTCTGTGACAAAGCTCCCTTGAAGATCTTTTTAATTGTCTAAATTAACTGCACCAAATTTGCATGTCAAACGGTAAAGGGCAACCTGAGATAAAATGTAAACGTTTTAAAAAGCCCCCAAACTAAGCACTTGATTTGATAACTAGGCTTTTTAATGTTATGGAAGACAACTGCTCCTTTCCTTTTCAAAGACGGCTGATCTATGCAAATAGTGAATTGGAAATGCCTAGGTCCCCGCGCCGTCAAATGGCCCTCGCAGGTTATTTGAATATCAGTGGCGCTGCTTCTGAAAAGGTTCAAGGATGCTCTCTGACTTCTTTGTGATTACTCAGTGCGGCGTCTTATTCTGAAGAAAAAAACTCAGGAATAATTAAAGGCTGGGATCAGGCCTGGGAACACATTTGGGACAGGAATCTCATTTAGACAGTCTCTTTCAAAATAAGGCACAGTTAAATTGACCAGAAGGCAATTATTGAAATGAAAATTATTTTCACTCTCTTTGTCTTCTGACCACCAACTTAACAGCCCCAGTTTAAAAGAGGGAGAAAAGAGGGAGAGACAAAAAGAAAATTGGTAAATGAGATAATTTCGCAATTCGAAAAAAATGTTAATTTAGAAAATAAAGTACATATTTACAGAATAAAAATATTTCTAAAAGATTTCCCACACAAGAGGAAATACAAGCGAAGTCAGCACCAACATATTTTTTTTTTCCATTTTTGATTACTGTCCGCCTTGGGAATTTGAGCGAAGATTTTGATTTTTAGGAAAGAAAAAATAAATTCTTGTTATTAACAATCAGCAAAATGTTTTCTCGGAAACTGTTCTGAAACACCAAGTCGCAAAGTAGCGATAAAACAGAACGAAGGTCCCCAGCAGGGAGTTTGCAGCGTGACATTCAATGGCTTCTTCCTTCTCCTTCTTGAGCTCCCCGCGGCCAGGCTGCCCCGCTCTTCTTACTCGAGTTTTTCTTCACTTTGGCCA

SEQ ID NO: 101 - protein, 2367 aa, Homo sapiens
ATGCAGCAACTTGGAAGGTAACTACTTTTCCAGCAGTTTTAAGATGCCTACCACAGTTCCTTACAGATAGCACAAGGAACATTTATTTACATGACATAAGCAGATTAGTATCTGCTTCCCCTCTTTTTAACCTGCCTCTTGAATGGAATGAATTCCCTCTCTCAAAATGACAAGTGAAAGAATAATTTTGCCTCTGATATAGTTTTCTAATTTGGTGCAATTAATAGCTGAGGCTTGGCAGAGAAACGAGGGCCTGACACACTAATTACAGTGTGAGCACTCAATCATCAACACCTTTGTTAGTCGCACGATATTACTTTTTCTCTTGCATATTATTGGCTAATTAGTTTGAAAAATGTCTGTTTGGCTTGTGCAACAAATGGAGGCTGTAGGTTTTGTCTTGGTCTGCGCCTTTTGTACACATCATACCTCATCATACAGACTGAAGCTGCCACGGGAGTGAGGGCCATGGCTACTCAGCTGGAACTAAAAGAAAGTAAAGTGAATATTATCCTGTCAGAACATAAATGCAGTTTATTTACTTAGACAAAAGGGTTCATCTATATCCCTGTCCAAACAACTTCATTGTCTGAATCTTACAAGGAGCTAAAAAAAATGTTAGTTCTATGCATCTATTTTTGGAAAAGAGCAACGTCTGGAAAGATAAGGGCACTCAGCACAGACTAAGTGAACTGTTTTATTTTCATTTCAAAAAGCAGTCAGAAACATCAATTAGCCACAAGCCATTTGGTACAAAAGGGGAAAATGTTTGTAGCTGAGAAGAATAGAAGCAGCAAAGCACTCATCAGCATACTGAGAATTTTAGACTGTGAGATATGCTAAAGTGAATTAATTTGGATTTAAAATGCAAATTAATCTGGCAAGCGATTACAGATATATGGGTGTGAGACTCAGAATGCTTTTAATTTACAAAATGTTTAGATGTTATTAGTTGCTACAGTATGTGGTACTGTAAATGAATGTAATTGTTTTATTTATGCACAGTTACTTGGTATATATTTTATATGATGAAAATGTCAGCAATAATCTGTGCAATATATGTTTTGGAGGGTTTTCAGTAAGTAATATTTATGTTGAAGATTTACATTTTCTTTTGTTACTCATTAGATAATGTAGTGAATGTTCTGTCATTTGATTTACTGAAAGAAATTTTAAAAGAAATGAAAGATGATTTAATATCTTAGCTTGGTCTCATCTCCACAGCTCGGGGATCCAGCAAAACTCATTCTGAACAGCTTATTAGTTCTAACTATATCGCATGCATAATAAAACTGCTCATTTGCTCATTAATATTAAAATTATCATATTCAGAGCCATGGGCATTAAGATCAATCAAATCCTTGGATTTCAGGTCAGATGCTAGATCTGCTTATGCTTTTTTTTTTTTTTTAAGAATTCTTCTCTTAAAGCAAGCTAGAAGCAGCTTGTCTTTGTGCAAATAGAAAGAAATCTTCATCAAAATTACTTTGTTTTATATTCGTAATATAAGAATTAGGTCATTTCTGAGTACTTGATAGCTATATGCCAATGTACCTTGACAGGAAGAAATATTTGCTTAGGTTTATAATTTGAATTATGGAAAATACTCGATGTAAATTATGTGGTCTACTGTATATTTATTATAGCTAAAATTTTAGGAATGACTTAATTTGATTTAAAAATGTTAATTTTGAGTAATTACTCTAATACAAAGCTGCCAACAACATCTGTTTGCATAATCATTATGGGAAGAAAATGTACTCTCGGGTTCCAGCAACGACTTTCAGTTGAGTTTAACATTTACAAAAACTTTATTGGGAATTTAAAAAAAATCTAAGTGTGTCTTATTGTGCAGGCAGAACGTTACACTGTAACTTGCATATGTCATCTAATAATACAGAATAAACAAACTCTGTCATTTCATTATTATAGGGATGAAAAGAATGCCTTTGAGCTTATTTGCATAAAGCTTTGTGCAAAATTAACACTTGTCACTGTAGCCTTTTTAGCATTTTAATACCTCAAGCAGGACTGGTTCCTTTGGACATTTCAACCATCCCTGAGTGCTTGATCAGGGACACAACAGAGCTGACCTAATTGTTCTGGCATTTTCAAAGATACTGTAATTTGTACAGATATTGCAATTTAGACCAGTTCAATGAAAGGAAGGTTTTGACACAGCTATTATTAAAATAGCTTGGAAGGTTCTCTTATCACAAAGTTCAAACTGCAGATTCCAGTAATTTGTAAGTTTGAGGTTTGTAATATCATGCCATATTTTGATTTTAATACTTAAACATGTTAAGATTTTTCACTCTGATTAAGTAAGATCAATAATGTAGTATGTTGGGCTGCCTTATTAGACAA

SEQ ID NO: 102 - protein, 1669 aa, Homo sapiens
CAGCAGCTGAATGAGAAAACTTACTTGATCTAAAAGATAAAAGAGTCAGCCAAACCCAGGCCCAAGTCCTTTAGGTGCCAGCCATCTATCTAAAGAAGAAACCTAAAGCATTGTTAGAAAGGTTTGTAGTTCTGTAGCCTTCCCTCCTCCAAAGGAGGAACCTGATGTCTTAATACACTATAATAGCCAAGGCTTCCTGCCATCAAACTGCTAACAATAAAACTGCCCTGCAATGTTCGTGGGGAACAGAAACAGGCAATACATATTTCTCTATGTATCTGGAAGTGCCTCAATCATATACTTAAATTTTACAGTCTTCTCCCCAAATGAGAACGATTTCCAGCCAACACGTTCACAAACTGTACTTAACGTTAAAAGAAAACGGATAAAACATATGTAATTACTCAAGGTTAGACTTCTAATTCCTCAATTCACTAAAGGAAACTTGGCAAGAAGATGCATCATTTTGCTCCTTTCTACTGGGGCATCTGAGGAGGAGAGCCACTGAGGCAGCTAATACACAAAACATGATCAAAAGTGATTAACAACAGCTTCATATGCAAATTACATTAATGAAGGAGTGCAAAGTCATCATGTAAATTAAATATGTCAAATCTCTTGGTGAACTTTTAATCTTGAGAAGAAAAAACACTGCTTTAATTTTTTTACATCATCAATTTTGCAAGATTGAAAATCTAAGAATCTTGGTGCTATAAACAATTTTCACCTTTTTTTTCTCCTTCAGCAGGCTGACAGGCCAGCCTGATGTGCACCGAATGTACATGTTAATAGGCCAATCAAAAATGCAAAACAATTCGCAATTACTGGAAGGACCTAATGGTCATTAGAATTTACAACTAGGTAATGAACTGAAGTCTGCCCACACCATGCATATTCATAAAGCAATTTAGCCTTTGAAGATTAAAGAAGTGCTTAAAATTCAAATGAGCTTTAGCAAATTATCAGTAAGATTCATCCAAAAAGCAAAGGGTTTTTCTTCCTATGATTTCCTCATTTTTTTAATGCAAAATTGTAATATCTTCCAGACTGAGCTTAAACTAAACATAGAGCTTCTAGTCAAGCCAAAGGGGCTAAGATACAAACAGAGGCTGCAAACATCGTCACGGACTTTGTTCATAAAACTAAGCCCTTAAGAGCCAAACCTATCTCTAAACATGGTAATTTATCAAAAACAGCCCAGAGTCGCTCATAGGCAATACTGCATAGTCCTCCAACAGAACAGATTAACACGAGTCCCTCCACCCTTCCAAAAAGCCTTTTCCCCCTCAAGTTGTCTCTCCTGTGTAAACATCCACTGTGGTATAAAAACAGCTTTTTCATTGGCTTGGAGTGGCATTAATTTTAGAAGTTTCTGCTTCCAAAGGGAAACCAGCAAGAAAGGAGAAGCACAGGAGGGAGAGGAGCAAGGTCTGGTTTACTTCTGAGGAGTGCAAATCCTGTTGCTTGAGATTTGCCTTTCTGATTTCCTCCATTCGGCACCAGCCGCATTTAATCCATGGTGAACGGGTCATGCAGACATCAGCTGACATTCAGAAAGTTGTGGTGTCCACCCACCACCACCATCCCACCCCAGTTATTAGAGAGTATCGTGGGAACCTGGATTTGCAGGCTTTCCAATTACTAGTCTGGAGAAGAATCCTTTGCTTGA

SEQ ID NO: 103 - protein, 2276 aa, Homo sapiens
TGATTAAAATGGTCCAACAGCGGGCGCCCCTCCCCACTACCTCGGAAGAGCAACTATTTATCCTTTAGAATCTACCTTGTCCAGGGCTTTTATATGCCTGGCCTTTGAATCGGTCATCTCCTGTTTGTATCGTGACTAAGGGAGAGGCTTTCTGGCAAAATCTTGTCAGTGATGGTGATTTCTCCTCCACATTGCTGCTGAAACTGGGATGCAGACTTCCTTCACATTGGCTTTCTTCTTCAGGAAATGCACAGGAGCCTCTTGCCTTGTAATACACAGTCTGTCTCATTCATAAAGTCTTGTCCTGGAAAATGCCTCATTCATCCCTGCAGAAGACCCGCCGTTGGGAGGGCAGGGGCGTTCGAAACCTTGGGAGACAGAAGACAATAGTGGAGTGCTTGGCAGCAGTGCCTGGGCTGCTTTAGCAACATGCACCCACGCCAGGGAGAGGATAAAACGCTGCAGTTGTTTACTTGCCTCTCTGGAGCAAAAGAGTCTCTTCGCCTACAATATAGATGCCAAATCCTCAGGTCCTGAGTGAGGAAATGATGAGCTTCGCCGGGGATTGGCATGAAGTCCTGTGCTCCAAGATAGCACGGCATTTTACTTGAAAGCATTCGTTGTTTAAAGAGAAAACGAGAATTGTGGGATTTTTTGTCAATCGAGAGTCAGCCAACTTCCTCTCCCACTGGCCGCTCACACAGAATGCCCACCGTGCCCTGCGGTGCCCTGCCACGGAGCCAGGCTGGCCTGCTCTCTGGCCACCGAAGGCACTTGCTTCTCTTTCGGAATCTGATCACAGGCAACTTAAATTTGCCAACGTTACCCATATTAGTAATTGCAAAATAATAAACATGGCAAATTTCCTATTAATAAGGCATCCAGTGTAACTCCTTTTGCAGAAAGAGCTCTCTGGAATCCTAAGCCTAATAGGTCTGTGTTTATTTCTCCACCAGCAGCATAATGTGACTGATTTACAAGAGTTTAACTCAAGTGTTAATCTGACAGTGACGAAGAGCTCCTCACTGGTGCAGTCACTTACACTATCATATTAGTTGCCTCCTCTATTAAAGCAGTGTGGTCGATAATTGGAATGCTTTTATGTCTAGTGGTTCTGACAAGCCTCTTCTTCAGGTCACATATGGGCGGTCTAGCTCTCCGCTCAGCCCAACAGTGGCAAATAATTTAAACTGAGAAAGTATTGTTCTCCTCGTATTGTGGAGCAAGGGCAGTTCAAGGGAAGTGAGACTGTGCACTGGCTACCTGCTGCTGTGCAGTAAAATAAGGTGGACATGATACAGGGTTGGGAGTACAATTAAATCTATTTTGCACCAATGTGTTGCTGGACAGATGAGTTTCCACATGGCAGAGCTTTATGATCTTTAAGGTAGACTGAACTAATAGATTGGTGTGGAGCGCACTGAAGTTACCAAGGATGAGAAAGCAGGCAGTAGTACATTTGAACTACAGGTTTCTCATATGCTCCACGTCATGCTGAGTTTTTATAGCTCCTGGCTTTCAAAAAGCCTGTTTCAAAGAGGTTTGCGCTAGACTGGGCATGCAGTTTTGCTCTGCAGATATTGTCGCTACCGATTTAGTGGAATGCAATTAGGAAGCCTAAATTAAGTGGTAATGGAGAACCAGCTCTTGAAACTGGGGTTTCCACGGCAACCACTGCTTACAATACAGCCTTCAGTTAGTTTTCCCACTTTATCTGCAAAATGCACAATTGAGCTTTAAAACAGCTCGGTGCTGAAAAACGCACTGTAAACAACTGTTTGCAATGAGAGTTTTACACTGTCTTTAAATACAACAAACTATCACATAAAATTTACTTGCCCTCCCTAATAAAGCAAAATCTGGGTTGGCAATCAGTTAGCGATTTTAAAATTTATTATTCCTTTCCCCTGTTTGGATTTATTTTTAAGGGAAGATGCCACGAGTCATTAGGTCTCTTAACTTTGGTCATTCTTGCTGCATTTTCAGCTCCCCTGACAATCTGCCTATCCCACCAGTCCCTTGCTAAAATGTGTTTCATCTTAGCAAATAATTGTTTCAAATAAACATACAATGTGCTCCTTTTCTAGGTTCTTTTCGTATTTTGGTAACATTTTACAGATTCTGCTCGTGTTTTCCCTTTGTAACATGTCATAGATTTGCAAGACTTTCCTATTTACTAATTTGTTATTAATCTTCTTTCCAGCTTACTACTCTTTTAAAAGTCCACGTTTCATTTCTCTGTACATTCGGCAATTAACCATCGAGGCTGTCTTTTG

SEQ ID NO: 104 - protein, 1872 aa, Homo sapiens
GTGGCGGAAATCAATTTAATAAGTCTAAAAGACAGTTCGGGTTACGTTATCAGCCAGACAGGAAATACACATGCAAAGAAGAAAAAGAAGCTATGAAAGGAAGAGTGTAATGATGTTAATTTCTTAATTTGTTTCCTCTGATGTAGGATCTAGACATTAGTATCATTGTCAGTACGTGTGCAAGTCACTTCAGAAAAATCACTCCTGCAGTAGAGCTAATTGTTATCAAAATGTAAAATGTGTTCTGGGTGTTACTGATACTACCTATTTGTACTTGGCAAAACATATATTTTTTTCCAGCATCAAAATGGTTAAAATGAAGAAGCCAGGTTATTACACATTTCAATTCCAGAGTCAAATATAAAAATTTCTATTATAGGGACAATTAATTACATCTCAAAATGGCAAATGTGCATCCTTGTCAGGTAGAGTGTACTCTGATGGCCTTTCCTCAAACACTGAATGTGGAGATTTGATCTCTTCTAATGGTGCTGAGAAAAGGGTAATTACGCTATGGTCAAAGCTAATTTGCTTTCTGCCAGATGAACTGTTGTATTTTATTGTACGCTGACATTTTAAAGTAATTACGGCACTGTTGACCTTAGACAATTCCAGTTGTATCGCTGTCTACAGCTGCAGCGCTTGGTCTACCTTTGGCTGGCAGACAGTGGCTGTAACGAGGTAATGACACGGACAAAGAGCACCATATGGGGCTCCTTTGAGATACACAAAGCCCAGTGAAAGGAAACAAGAAAATTTTAACATCATCATTACAGTCACACATCTTTACAGCTATAAAGGGTCCTGTCCACGCGTGCTTGTGCGCGTGCACATACACACACAGGCACACAAATAATCTAAACACTTTGCCTGCTTGTACCTTAGGTGTGTGTGTGGGTGTGTTTGCACATGTTTGAGTGTGTGTGTGTGCATGTGCGTGTGTGTGTGTGTTTCTTTTGTAAATGGCAGCATGCATCAAGAAGAAAAAGAGGTCAGGTAGAACTGAACGTGACGGACTGGTCTTCCACTGACAGGAGTTCAAAGGCTAAAGACTATTGATTGAGATAAAAGCCCAGGTTCTTAACTAATGTTAAAGACACTCCTTGTTGTCTGAAAGCTGTGCACATAATTAGGCAGAAAGAAGAGCACTTCAGCCAGCAAATCACTATAAACCAAGCCTCATTAAAATAGATATTAGTTCATTTAAAGAAAGAAGTTATTATTCATTCATATATTTTAATGAGCTATCAGGCTGTCTTTTCTATGATAAGAAAAAAAAAAAACATGTTCAGAGTTTGGCCTGGTTAATGTATCCTTGCAAAGATAGCAAAATAGATTAATATCACTCAAAAAGAATAATGCTTCATCTTCTTCAAGGAAAAATGCACAGGATATTGAACTATAGAATTATTGTCAAGAAGAGGTGGGAAAAAACTGAGCTTTACCATCATGTTAAATATTTCAATCTATTTGGGTAGGTGGAAATGGACTATGGAAATGTGAGCTCACTTACAATAAGCCATGGAGGTTGCCTCCATCATAGCTTATTGCCTACTTATGTGACAATTACATGAAGCAAAGGAAAGTCAATGTATTTCCTTTTGAATTACATTTCTATCATTCAGGGTTTCCCCCTTAGTAATTATTGGAAGGGTGCATGAGTTATTATTTCATTGAGTAAAAAGATAATAAAAATTACATTACAGAGATGGTAGGGTTTCCTGTAGAGTCCTTAATTTAGTTTAAACTGTGAGGACTGTTTTTCTCCTAAATTTGTTTCCTAGTTTGTTTGTTTGTTTGTTTTTCATGAATATTTGGAGATCTCTATGCCAATAGTTTTTGGCCTTTTTAAAGGCAAAGTTCATTTGACAA

SEQ ID NO: 105 - protein, 1470 aa, Homo sapiens
CAACCACAAACAGCATAGTGGGGGCAAATCTGTGTTAATGTGTATCTAAAAAGCCAAGAAAAACCAGAGGCATAATAGATTCAAGTCAATTTGGGGAGGTTAGTTACTTTGTCAATTCTATGTATGCTGTTTGTTTTGTAGGAAAAATATTTGGTTTAAGAATAGACTAGTGTCATCCTAATCCACCACTGGTGATAATACTGATGTTCAGACTCTTAAAAAAACTTTGTAAAAAGACAGTGAGCTACAGATGCATGTGCTGTATTTTTAGCTCACATACAAATATTAGAACTCTTATTAAAATGATAGGGTTTTTTTTTTAGCAGAGAAGGATGAATGCTGCATAATTAAGTACAGTATTTAATTTGGCTGTTGTGAAGCAAAAGAATAAGGTAATAATTTTTATTGTACTAATCAGTCTCAAGATGTTCTCTGTGTTAATTGGGTTAAAAAAATTGCAGTACTTATTAGAAATTCTAATTTCACAATGCAGCACTGACAATAAGCTCAGCCAGTGAATTATTCACATCTTTAATTTGCTCACTTAATGACAGTGTTCTGTAATCAGAGTGCAGAGACTGCTGCCTATGCATTATGTATGATGCTCAGGACTTAAATGCAGGACATTATGAAGCTCTCAGTGGTTCAGTAATTAGTTTTCCACAAGACAGGATTTAGATATTCAGAGATAAAAGTCCACAGTTGGATAATATTAAGGTTGCAACACAAAATAACAAAGGAAAGGAAGCTCAAAGTTTGGACTGAAACTTTGTCTCTAGGGCCTTGTCCACCGTGGAAACAGAATCATGCCACCTGAAATAGTTGCCTAGCTCTGATCACATGTTTGAAAACTGTTTTTGAACAAAGTTGTAGCAGGCAAGGCATTTGAACAATTTCAGTGGACCAGAGGGGAAAGATAAAACCTTTTTAATTAGTGTTCACAGAAGCCCTGCAATATATCCTCCTAACAAGTCTGTAGTATGCATAGCAGGCATCCTCAATGTGCTTTGTAACTTAGTTAGTGCAAATGCAAATCAGGTTACAATAGTGTTTGGCTGTAATTGTGTTTGTAAAAGGGTTACATGCCCAAATGGAGATTGAGCTTGCTCATGGTTTTGTTCCAATTGCTTCTGAGGGAAGGTTTGAAAATCAAATGAGATATTAAGTAAATCTGGGCATGAAAGGAAGTAGATCCGAATTGTCACTGCAACTTTGGAATTTCTTACACTTGTCAGTTTGGAGTTGTCAGTTTTTCTTTAACGATGCTACGGTTGTTCTGTCATAATTATGTAACTTTAATGGATTACCCAGCCCATTAGCAATACTTTAAAAATGTATACTAGGTTTCAGAAAACATGTCACAGTATCATTTCTAAAGTTTAATAAGTAACTTGAAATCTTTAAGTGATTTTTTTAAAAGAAGAACATGCTGTTATGGTAGACTATATGGGGTATTTTTGAGAGCTTAAA

SEQ ID NO: 106 - protein, 1140 aa, Homo sapiens
TGACACACAAGGTCAGTCAGCTTGCTAGCGCGGAATCGGCCCCGCAGGTGCTAGGAGGCTCACTTCCTTCTTCGCAGACGCTATACCCTATCCCCACCTGCTCTGGGGAAGGCAAAGCTCCGCAGACTTCTTATCCCTGAGGCAACCCGCTACCCAAATGTCCCTCTTCTTTCCCACGAAGGAAAGAAATTACCGTAGGAGATTTTGCCAATCCATGCCAGCTTTCTGATTGTTTTCTTCAGGTAAGGGGAAAAGAACAGCCAGCGCGTGAATGGAGAGCTGAGGGCCCACTAGGGAGAGAACCTCTTCCCCACCCTTCGGTGCCTGCAAAAAGGGACATTGGCTATCCAGGGGAAAGTGCAAGAAAGAGAGCACTAATCGCTGAACCAGGAGACAAACACGATTACCAGCTCCGAGCCTTGAGTCAGAAAGTCTCATAGACTTTAAGATGTTAATCCCCAGCATAATCCTTCCTTTGGCGTGTAGGAATAGTGCAGCCACAAGAGTTGTTTTGTTATTTATATTGGCGTTTAATAAAACTCAGCCAGTGGTGAATGGGCTGCCCACTCTCCAATGGTAATTAATTCCCTATTTCAGTGACCCAATTGTCCTGGGACAGAGCGGTGGGCCCGTCCCAGTGCCCCGATCCCCCTTTGTGCGGATACACTGCCCTCGTGCTTCAACAGCTATGGAAACTCATTCTTTTGATGTCATTCAAGGAGTTTTCCTTGGGCATCTTCTAAACTTCAAGGACCCTTTTCTTTCTGCGTTTCATGAAAAGCAGTGCGAGCTTGACCACCTCTGTAGAATTTAATGATTTGGTGAAAGGGCCCTTTGGGATTTGTGTAAGGAGTTAGACAGAGAGAAAGGAAATTTGGCAGCCTGCTCCCTCGCAGGGACCGTCCCTAACCTGGAAAACACAGAACTTTGAGAAATGGATAAAGATCTTGAAAGCTGATTTTCCCTCTCCTTTCCCCACTAAGGAAAAAAAAATACCCAAAACAAACAAAACAAAACTTAATTCTCTTCTGGAAATAAATGTATCGTTTATTGTTGCTGATACAAATTAAAAGGGTGATGTTGAGGTAAATAAGTTCGAATCTTTAGCAGAGACTCTTCCTTAATCTGTACCTTTTGGGA

SEQ ID NO: 107 - protein, 1488 aa, Homo sapiens
AGACTTGCCTTGTGTTGGAGACAGAACCTTGTCTGCAGCATTTCCTCTGCTGTTTGAAAGAAATACATAACCAGATATTGGGGGAAAGGCAATTCCAGAGGAATCTACAATAGAAGGTGGCCTGAGGGAGAAGGAATATAACAGGGCAAGTGTGGAGTTGAGGGCAGACAGCAAACCTTTCTTCATCCTGAACAGGAGTGGAATGAGAGAGGGTGAAGTAAACTCTTGGACTCAAGCTCCAGCCATGGCCCTAGGTGAGGCGGGTGGCCTAGAACCTCCTGGAGGGGCATGGCATCGAGTCCTTTGCTGCTCCTGGAAGCAGGCAGGCATGCCATGTGTCGAGGCTTCATCCTGCTGGGGAGACAGCCTGGGGGCACTCGGCCCCAAAGTTTATTTAAGTGAAAAAACCCATCCGGAGACAAGAAGGAGTGTTACACTACTGTCAAGTTTTAGACGTCGCCATCAAGCAAAAAAAATTACATCCCGTCCTGACGAGCGACTAATCAAGGCATGGCAAACGGTCCTGCAATAAATTACTCCGGCGCGAAATAAACCACACAAACAGACCGATGATAATAAATGTAAATTATTTCTCTGAAGAAATTTTCTTGGTATATGAGTAATACGAACCATCAGGAAGGCGTCTTCCTTAACATTAATTACAGAAAATGACAAGTGAGCTGATGACTGGGAAGGCTCATTATCTGAGAACATATTCACAACTTTGCAATTTGCGCGAGATGTACTCCGGCTAAATTAATCTCCCTTCTTTGCATGAGCCTCTTCTAATTTTCATGTTATTAACAGGTTTGCAGTATCAGTCAGTGCTTGTCACTCTAATCAGGTTTCAGCATGTTCGCAAAAGCGAAGCGTCATTTATAAGGATAAGCCCTCATAATGGTGCTTGCTTTCATGTGGAGAATTCTACAAGGCTGCTTTTAATAAGGTACTTTAATCATCTCCTTTGCTCAACTTTTGGCCCCACTGTTCCTTTATGAAGAGTCATTAAAAGACTTTGAAGTTCATCAAGGAGGAAAAATTCATGACATTGTTCGGATGAGGTTGGGGATGGTTCCAAGGGGGAAGCCTGGAGGGAGTCCGGGTGAGAGGGCCCTGTTGGCTTGGGGCCTAACCATGGGTGAGGAGGGGCAACCTGTACCCATCGTCTCCACCATACAACACCCTGTAGGTTAATATGCCGGGGTCACTGCTGAACAAAGACCTCACTGGAGAGCAGTCCAATTGGCAGAGCATGTTCTAGGGTCAATGATAGACGATCCTTAGAGAAGGGGCCAGCCAGGTCAGCACTCAGGACAGCTCCCAGCACGCCACTATCACTGTGGAGTCTCGGAATCTTTTTGCGGGTTTTGGATCTATTCTGATGATCTGCGCTTGCTTTGGAAATCTCTCTGTCTCTCCCCCACCCCGCCCCGCCGCCCCTCTCTGTGTGTGTGTTCCCTCTCTCTGTTGCATGTCTCAAAGGGCTAG

SEQ ID NO: 108 - protein, 2030 aa, Homo sapiens
TTTTGAGGTGCATAGGATTTTTTTTCACTTTGACAATCTGCTTCTCATATTACTTTAGCTTTCTGTAGTGAGAAAAAGCACAGGATTAGGGGTCAGGTGCCTCAGGCTCCAGAACCCCATCTGTTAGTAAATAGCTAACCTGATCCAGACCATTCCCGGATCTGGGCCTCCAGACCCTCATCTGGGGACCATCATTAGGATTCCTTCTGTGATTTGATTATTTTCCTCCCTGCCAGAGCCGGGGAGGAGGCTAAACCCTTGCATGCAAGTCCACCAAAGCTGTCCTAAAATAATAAAGCAATTTCCTTTGAAATGGTCAGAAGAAAAGTCAGGAGGCCCTTGCAAAATGTGATGAAACCCAGCCCCAGCTGAATATTAAGTTAGCGAGGGGTCTGCAATGAGGGTGGGGGGCTGGGGAGAGAAGAGAGATGCAGGGTTGGGGAGAGAGAAATTTTAATTGCAATTGTTTGGCCTGCTGATCCTAGGCAAATGACAAGAAGCCCCCAAGCAGCCTCAAACACAGATATTTGAAAGGCAGAGACGGCTGGGGGATGGTTTGGTTTCTCCCTCCCCTCTGAGGCTGTTTGAGGAACGGTCTACAGTGCTGACAAGCACGGGTTTTGGAGGCCATTGAAAAGTTTTGGGCCTAAATAGGGTAGGCAGCTTGGCTTAAGTGTTGCTAAGGAATACCTGGCAACCAGCAACAATAGGCCTTTTAGAGAATCCAGGGCAAACAGTGACCGTGGTAATGGGGTGGGCTTAAGGGTCTCCTTGCCCGGCTGGGCCCCTCCTCTTCTCACACAGAGGCCTGGGCACTGGGCTATGTTCCGGAAATTCCCTGCACAAAGCCCCATTCAGTGGGAGGAGGGCCAATGCGTGTGCTTTGGGGGCAGTGGGGGTGGAGACAGGGGATAGGGAGAGGGCGGGGGAGGGGGTACCGGAGAAGGAGCTTTACTGCCAAAAAAAAAAAAAAAAACCTCTCAAGTCTCTTTCTTCTCGCAAAGACTAAAAGAGGCACAGAAAGTGCTAAGTTTGTAAAAGAGTCTGAAAAGGTTCAGAAAAGTAGCATAAAAGGAACTGGGGAACGCCCCGTGAATTTTGAACAGAGAGCAGAAAAGGGACCCTAAAAAGCAATTAGTGATGCTGCTTGTAAATGAAGAGGCACCTAGTTTGGGGTGGGGAGCTGAGTCTGGAGGTAGGTGTGCAGGGGTGCAGCAGGTGGTGGGGGTTGAGGGGCAGGTGAGGAGAATGAAGTGGGGCGGGAAGCGGGTGAGGGGAAGGGGAGGCCAGTGAAGAATGGATGGATGGAAACTGGGGAACTGTGGCCTCAGTCCCCACTCTAACCACATGCCTTCAGGCTGCTCTCTCCTTGGGCTGTGCAGATGCCCCACCCACTCAGTTTCTGTCCCCTGGTAAGGCAGCCCCCCGAAAGTCATGGGTGCCTGGGACAGTGACCAGCACCCAGAGTCTGAGCAGTCTCCCCAGTCCCTTCAGTCTCTGATAACCATGAAAGAAGCCCTGACGTTCTGTGTGAGTGTAGACTGCACACTCCTCACAAGTAGGCAAATGGCAGGATGCTCCAGGGAGCTGGGTGTCTGCCTGCGTTCCTGGGGGAGGCTCACATGACAGTCAGTGAAGGAAGGCCAGGGAGCCAACAAATTAGCGCTCTACAAATTCCACGTGCCTGAGCTGCATAACATTCATGCTGAAATACCCTACTCAAAGGCTCTAAAGATAATAATTTTACATTTCCAGCAGAATGTGCACGGTGACAATTATCTGTATTCCTACTGTGTCGCAGCATCAACCGATAATCAAGAGAATTATGTTCCAGTTGAAAGCAGATTTAAATAAACAGACACTAAATGGAAGCCAATAATAGATGTACCAAAATAGTCCAGGCAAGGAAGCAGCCATTCAGATAAAGAGCTGTTTAGTCGAGGAGACATGAGGCATCCAGAGCGCAGAGTTTACAGCTCTCTGTCTGTGGCTCAGCCTGTCTGATTCTTTCTAGCTGTCCTCTGCAGACC

SEQ ID NO: 109 - protein, 1492 aa, Homo sapiens
AGTGGTGAACAACCACCATTGCTGCATCACGGAGTTTAAGTTCTCATCTTACACTCAATTGCCAGGGCCGTGGTCCCTTTACAAAGTAGACAACTCCAGAACTGGTGCTTGGGAAGACATCTTTGAGGTCAGCCAGTCAAACCTTTTGTGTTACAGATTTAAACTGATGCTGAGAAAGATGACTGGCTTCTTCCCCCAACTAGTAAGTTACTGTGGGGAGAGTGCAGAGCACAGGCCCCTTCCACCTCTTGTGTGCTCTTCAGGAGCCCATCTGTCTCAGCCAGAAGACAGAAACAGAGGGAGGCCCTGAGAAGTGACAAGGACATTGGTTGGGGTGGGCAAAACACTGTCTCCTTCCTGTCCCTGGCCTGTGAGCCTAAACACAGGCAGAGCTTTTTCTTTTTGAAAAGAATCGCAGCCTCAACTGGCCTTAGCAGCAGGTTAGGGCAAAGACAGAGACGGGGTCGTCTTCGGCGCTGGTGGTGCTGGCGGTGGTGGGAGGGGAGGGCAGGCCAGGGCACTCGCCTATTGTAGGTCTGGATTGGATGCTTCCACTCATTCATTTCCTTTTAATTAACCCGCATTCCTGGAGGAGAAATATTTATGTTGGCTCCCATAGAGGCAATCCTCAGACTGGAAAGAAGGGGGAAGAAAGCCTGTCTTAGCAAAACAATATCTCTAAAGAGCTCAAGAAGAGAAAATAGGAGAACAAAATGCCATTAAAATAGCCTTCTACCCCCACTGGAGTCAATGAAAACTTCATTTCACATGCTAATCCGCCACTCCGCCCCCTTGTCTTCTCACAACACCTTTTCCGAAAGTGTTTGGGAAAAGTCTTCGCAGTCAGTACACAGCTCCCTGCAGCTCAGACTTCTCCTTGTGTTAGTTCAGGGCCCCAAGTGGGGCTCTCGCTCCAGCAGCGGCTTTTTTCTCCCCCACTTTAATTTAAACAAAGACTTCGGAGTTCATCAACCTCCCACTGAAATTCACAGCTGCTGAACAAACTAATCCCCTCTCCCGGCCTTTCTTCCCTTCAATGGGCTCTTGGCTTCAAAGACACTTTGGGAAAGGACTTTGCTAGGGCTCACACTGCTTCATCAATAGAAGTTAGTGCAAGTATTATCTGAAGAGCAAGTGGCTTTACAAACAAATACTGCCTAACAATCCCTCCCTCCCAAACACACACACATCTAGCCCGCAGACATGATGGGATCTACAACAGGATTAGGGCTAGCATCCCCTGGCTTCACACCCAGTCCCTTTGTATAGCTGAGCTCAGCCCTGAAGTGGGGTAGGGAAAACCCTGGAACTGAACACCAGGCACGGATGAAGGGAGACAATCCCCCCACCCTCAACACACCCAGCAGAGTGACCACAAATGCTGCAAGGAGAGAACCTAATTCAGTGGGAATGGACACCTTCCTTTAACTTTCTTGATTTATCTCTCCCTAAGCCTCTCCCCTGCCTTACTAGGGTGCAGGAAGCAAGAATA

SEQ ID NO: 110 - protein, 1434 aa, Homo sapiens
AAGCAACAAAAATGCAAGACTAAACTGTCAAAAAATACCAAAGTTTCAAGTTCGTATTTAGCAAAAGTCTTTTCTTATAATAGAGGGTCATTTTGTACATGAAGTGCAAGGGAGAATGAAAAGACACAGAAAGAGAGAAAGGCAGAGAGAGAGAGAGAGAGAAATCCTTTTTCATCCTTACCAAATTAGCTTGTGTTTATAAAGATGTCAAACCTTCATTTTACCCAATAAAACATTTTTGGTGTGGAAATGATGTTCCCCTCGTGAATTTGCATAAAAGTAAAATGATTTTTAAAATCCAGCTTTGTAAACCAATGTGGAACTATGATTGTTTTAAACCTTTAAACCAAAAGCAAGGCATGGTTTTTGTCTTAAATTTAGAATAAATTGAAAGCATACATTGATGTTCTTTGTTTCAAATACATTTTGGAACCCAGCAGACCACATTCAACCTAGTTAAATTATCTGAATGGATTTGGGGAAAAGAGAAAGGAGCCTGTTCATTTTAATATACCTTCAGAAATATTTTACTTCTTGATGATGACAGCAGCTCTTGCTGACAACTATTAATACATTATAAACACCCCATCAGAGTTATATAAAAACATGTCAGTTTTAAAGAGAACATCTTTGACAGCAAATTTTCTGATTGTGAAACAGCTGTGCCTTCAGTACAATGCATTAAGTAGTTTATTCCTTTTAGATAGTTAAATTGTGCATGAAATGTTGCTGGCGCAAGGGCTCCAAATCTGGCCTGATTAGCGAACATCTGTTACATTGGAAAAATTCATGTCTACCCTAATTAGCTGTCAGGCTGATGTACATCAGGCCTGATGGTGAGGGATCCTGCGCTGTTTAAGTCAAACAGGTTCCTCTCCTCTCCTGTCACCTGCCCTTTCAAATCTCTTCCTTTCATGGGCTGCTGTAATTAGAGATAGTTGGACACACAATGGAGCAGGCTACGGTCAGTTACAGTCCCATCTGTGCAATATTTTTATTCCCACCAAACTTGGGAACCGATATATGAAGTAGTTCAACAGCAGCAAGGCTGTTAGATCTGTTAGGTCTATGACATTTGTTAATCTTGGCTCAAGATCGTTCTCTGAAAGTCTTAGGATCCTGGAGTCATCATCTTGTGGTGACTGAAGGGTAATCTACAGCTTCTGAGGAATTGATCTTTGTTTCATTTGTTTTAAATAGGGATAGCGCTCAGGTGATTTTGAAATGTCGCAGTGTGCTGTAGAATGGCATGTTACTGTAAGATCAGGTATTCAAAAGAAAAAGAAGCTCAGTGTTCTGCAGTGTCCAGACAACTGACTATAGACAGCTACAGGAGGCAACTGACACCAAAAGATCTGATTTTATTGGGTTTATTAGTCCAGTGTACACAAGGTTTTCCAATGTAAATAAAAACTTTCATTGACCTGTGGATGG

SEQ ID NO: 111 - protein, 1552 aa, Homo sapiens
AGAGAAAGCCACAGTCCAGTTTCCATTTCCCCTGAAGAGCCAGAACCAGGGCGATGGGTCTTTCCCAGCACAAATTCAAAAAAGAACCAAACAGTTTCATTTCGACACAATGACAACCTCCCACCTTCTCTTTATAAATTTTTGATATTTCGATCGAAATATTCTATCCTACGTTCAGCATGTTTCCATTGTTTTATATTTTACTGAAGGACCTAAAATATTTTAAAGCAGAGAAAAGAACTAAATGATAGGCAGAGAGGAGATTTAAATAAAATTTTTAAAAGCCACAAATTTACAATTGTTTTTTAAAAAGCATATCTATGTATTTAAAATAATATAATGAATTGAATCATTTAAAATGCACCCCTGTCCTTTCAAATCTGTTTTTTTTTTTTCAAAAAATTTTTGAAAATCTAATGAGAAATATATTTTGACATTCCAATCCAGTGAATTAGTTAAGGGAAAACTACCTAAAAAGAGGCACACTAAACTTTTCTTATCCCCAGTGGGCGGTGTTAATCATCCAGTTTGAGCCTTGTAGTTTTCATTGTCGAATACTTGGGTTCTCTCAAAGGGAAGAACGTTGGGGACTTGCATTCACTCTTTTTCAAGAGGAGATTAAACACAAAATCGATTTAATGGAGCATCTGTAATCTTAAATACGAGAAGTCAAGAGCTAAAGCTATAATAGAAAGGTTAGCTTTCCTCCATTGTTCACACAATCTAACTCATATTTTTGGAACTTAATTATCAATGAAAGCTACCACATCAATGCAATACAGTATAGGCAAATTACAAGAACCTTTTACTTCTCCCAACTGGGTTTAAATTGCAAATCTTAACACTGAACAGTGTGCTTTTGGCATTGAATATTCAATACAGGGAAATGTGTTTTAAGTGAACCACCCAAGGGCCCAGGAACATTTGCTTAATAATGATACTTTGCAATTCTATAGGGCCTTTCAGGCAAGGATCTCAAGTGGAATGCTCTTTAACTATACCCTGCATGGGAAACCTTGGGAATATTTTAAAGTGCTCACTTAAGGCCTATTGGAAAGAATCTTTTAGTATAGATTTCACAGTATGATTTTAAGAAATGAGGTACTGCAGAATTTTCAGTCTCAGGGGTATCATATTCATGGGGATTTGGTGGTTACTGAACATTTATTAGTTACTTTATGTAAAGGTTAAAATGTACATTTTCTCCAACTTTTTATTTTCAAAAAATTTAAACCTACAGAAAATAATGGTACAATGAAACATTTAATTTCAAAGAACACCCATATTCCCTTCACTTAGGTTCATCAGCTTTTAACATTTTGTGACAATTGCTTAGATTTTTCTAAGTAGATGGATAGCTAGACAGACAGACATATATGGATCTACTATATCTGAATAGATAGGTAGATGTCAGATATGATTATTTGTTTGTTCATACACATACATAAACTTACCTCTTTTATCTATTTCAAGTAAGTGGTAAACATCACTGCACTTTATTCCTAAGTACTAAAGCGTGCCTATCCTGATTAAAGGGTATTCTACATAACCA

SEQ ID NO: 112 - protein, 1805 aa, Homo sapiens
GTAAATAAGAAATTTGGCCCTATTTAAACTTTATGAATAAGTAGATTATTTTGCTACTAGCCATAATTTTAATTTGAGGTTCACCATATCTTGTATACCTTAAGACATAGTAACAATACTTACATCAAATACTTAGACATTTTTACTGCTATTTTACTTAGGGAAAGATGTGTTTGTTGGTTGCTTATTTAGATCTTTGACAAATTCTCCACATCAAACAAGGTCAAGCCACAAATAATGCCCAAGATCAACTAAAAATCTAGTAAAGATCAATGACTTGAAATGTGGATTTGAAAGGATGTGGGTCAATGTAAAAGCTGCAAGAATTTTTTTCTTCATTATTTTAAAACAAATGCACATCTTCTGCGGGTAAAACAGCCCAAAGCAGTGTCTTTTAAACCACCTATACCAAAAGATAAAACACCTTGGAAACAACAAGCCTTTGACATCTGTGACACAGGAGACATGCAGAAGTCATTAAGGGTATCCCGAGGGGGTTCCAACAGTTGCTTCACTTTAGGGTGGATGTGAGAAGGCTTAAAATTAAATTACTTTAAAATAAAGTTAGAGCAGTAAGCAATTTCCTGCTTTCTACTCAGAAGGGTTTCCCGTGAGAAAAGAAAGTGGGCAAAAAGCTCAGACAGACAGACAAACATATTTACCCCTAGGTGGAAGGTACAAATTAAATTAGCCTGCTACAAAAGGGAGATGTTTTCTCCTTCTGTTCAGATGTCATGGTAGTGAGGAAACATAGTCTGGGGCCAAGAAAAATGGCACAAATGCATTCATCTGAGCTACCATTCATCCTGATCCAAGGTCTAAACAGAACACATAAAAGAACGGCACTGTTGAAGGACTTCCTCTCCCTAGTTACCAAGTTGAGACTTGCAAAGGCACATGGGAGCAGGGGGTGGGGATCTTTCCAGAATGTTTCAATGTTGATGGAGTGTCAGAGGATGTTATGGAGTTAATGACTGAATCTGAAATCACATCAGTATAAGTTGATTCCATATTTCATAGAAAGAGCTGTATTTTATGGTGCACAGTATGGTGTGTTTAAAGGTACATTGTGAACTTTCTTTCCCTCTGTAGCTGGAAACCAATATAGGCACTTCCAAAGAGTCAAGTATCTATTATAGTGCCTCATTAATATGCATGTTTTTGGCACTCAGTTTGGTTCAGCTGGTATGCTTTCCAGTATCTCATTCTTTATTTATATGAGACTGGGAGGTGTGACCTATGGAGCCAGTTGGCTGTCATGAATTGGAATATTCATTAAGCCTCATGAATTATGCATTAGCCTGCTTATAATACTGAGATCCACATTTGATCTAGCCAGAACTCTCTGCTTTCCATTCAACGAAACGATCCACATTTTGGTCAAACTGTACATGTGTTCCATACACTGCAGAAGGACTGCCTGTATATTTGCCACCAAAAAGGCTTGGAGATTTTGCACCTCACATCTGACTAAGTGGGTTTCATATTTTTCGCTTGTTTGAAGGGCATTGCAGACATGGTTCTCCTCTGTAAAACGAGGTTAGAGTAGCATTCTTCCCTAGCCTGATTACTATTTCCATCCATTACTGCCCTTGCCTATAAAAGTCACCAATGACTGGTAAGCAGCCTGGATTACAAAAGATATGTAGCTATCTCCTGGCAATCCACACACAAAAGCAAAGCCAAATATAAAAAACATGGAAAGTGCTTTTAAGAATTTAGTTTCTCTTATCTAAAACAAGGAAACCCTTTTACTGATAACCTTATCATTTGTGATACTTTTTTATGGATAGGTATATCCTGGC

SEQ ID NO: 113 - protein, 1361 aa, Homo sapiens
GCACATGAGCATTTGTATTTGAATAACAGTGGGTCTGTGGGTTTAAATCATGTATGCATCAACAATGTACATATATGTGATTATGAGTGCTGGTATATAACCACATGTTGTATTTCTGGGTTGCTCTCCATTCATAATTGGGTGTGCATGTGTGCGCACGTGACAGGTTGTTACCTTGCAAGCAGGAACTCATGCAAAGCTGTGCATGAGATTTATGTGTGTGTGATTTTGACACGGGGCTGGTGTCCCTGGATAAATGAGTGTGTTCAGGCCTGTGACTGGGGTACAACAATTGTGTGTTGAGAAACTGCAGACAGCCCTTAGGCCATGTCCAGCGAGAAGGAAATGTGTAAATGTTTGTTGAACACAAAACAGAACAGCCACAAAATGCCAGGCCCTGTAGTGGCGCGGCAAATCGTGGAAGTTTTTTCCTCCCTCTTCATCTCTCCCTCTCCCCAGCATCTCGGCCCCTCTCTGGCGTGGTTCCCTCACACCTAAGCCCAATGGTGTTTTGCAGGCTTTCAGCTGTTACCTCAGTCCCTCCTCGCCTCATTCCCGATTCACTCCGTTGCTATAGGTATGTTTGAAACCCCAGCGTGGTAGATTTTAATTAGTCTTCCTACAGATGGCCAATTAACATTCATTACTTTTGCCTTGAGCGATTAATTATGAGTTTGGATAGAAAAGGAGAGAAGAGGAGAGGAAGATGGGCAGGTGAATGAAAGGAGAAAAGAGAAGGGGGTTTGATTGGGAGTTTGGAATTTTTACACAGAGCAGGCTGGTGGGGGAGAGGGTGGGAAAGAGCCGTTTCAATCCCCTCACTCCCAGCGGCCTCCCTCAGCCCACAGCTGCTCCGGGCCCCTAATCGGCTTGGCTGGCCCAGCCCTCCAGGAAAATAGAGCTCACACCCTCGTTTGGGAGGCCTTAAGCCTTTGGTGTTCCCTGACCCCAACCCTTTCATAATACCGGCCCTCTTGTTTCTTGTGCCAGAGCTGGGTGGGAACTGTGTCAGGAATCGCCCAAAATATTGCAGATAACCCAGAAAGGAAGCTCTGCTGCCAGTCACTCCTTGCTAGAATTGCAGTGGTTCACTATACAGATGAGAAAACTGAGGCCCGCATAGGAAATGACTTCCCCCACCTCAGGCCCCTTGGAAGGTTGGGGAGAGTCCAGCTTTGTTGACTCCCCAGCTCAGTTCTCTTTCTGCTGCAACCAGGGTGGTTTATAAAGATTTTGTGCAACATTCCATGAACAGGCTGATTTCAAACACAGTTCACATTCTTCTCTGTGCACCTAACTGCCAAAAGCTCCTGTGATTCCCCAGCCCATTGAAAGACTCCTTGAGTGTTGTTGCTGGGTTC

SEQ ID NO: 114 - protein, 1602 aa, Homo sapiens
GTGGTTAGAGTGCCAGGAGATCACACTGCTGCCCCTCCCTGGGCACCCCCAGGAGGGGGGCACTCAATTCACTATTTATGCTGAAAGTGACAGAAGATGACCAGCTGGCATTTTTTACTCTTATTTGTTTTTGTGTAATCAGAATAATAGTTATACCCACTGGCGCAGTATAAATGCAATACACCTGGATAGGTCTGCCCCTCCAGAATACAGAGGAAGGGGTATTAATTCATTTTCAATAGAGATAATAATGAACACCGATGTCGTGCTCTTTCCGAAAGATATGACTTTCGTGTTCGTGTGTGGCTAAGTATGTCAGAGCATCTGTACACACCAGTTTCACTTTCAAACATGCATTTTAAACTGAAGCACTCTTTTAACCCCATATGGTTTTTCAGTTGTACTGTATTCTATGCTTCTTTTCTTTTTCAAAATGCAATTAATATGGTTGTGTGTTAAATGATTCAGTGAAAGTAAATCTTTTATATTCAGGTAAGCAATTCAGCCTTGTAAGGTTTTATGGGAATTAGATTTTTCTGAAGTCTGGGTTGAGCATGCCCATAACTCTGACAGAGCCCTGCAGGCTCTTGTCTTCACCTTCAAATCATAAGACAGAGAAATCAAGCTCCCTCTGTGCTCTCAATTATACCAAAAAACACGGAGCAGAAGTCTTCAGTAATTCAATCCCTGTGGAAGCTTCTTCACACTGTTTGCGCTGTTGGAACTGCTGACAGCAGCAATCCCACCGTCCCCCGGTAGACTGTCAAAGTTCCTCATACAGTGTGAGCAGCTCTGTTCTGTCCCACAGCTCCTTCTCCAGAGACCTCAGAGCACATGCATGACTTTTGATGCTTGCTTGATACAGTGGCCAAGAGGCCAAAAAACATCACAATGAGAGTTCTCATACTCCTACAAGGTGCTTTGTACTCAAAGTAATAAGTTCTGTGGCTACATGTGGGCCTGAGTTGGTGTAATTTAATCACAAGTACAGCTGCATAAACACTGTACTAAGGAATGTCTGCCTGCAATTGGATTCTTTCTTTGAAAACACACTGTAGAAAATTCCTGAGTGCCATTTTCCATATGGTTAATGAGCAAATGTATCATGACCAGCTTTTAAAAGTAATTTGAATTTATGAGTTGCACTGATTCTAGCACATGTGCATAAGAAATCACACATACGCTGGGCTCTTCCTTATCAGGCAACACCATTTCATCGTTTTCTGCCAAACAACACCAAAAAGAACCACTCTGTGTGTTTAATTGGCTTAAATCATCAGTTACAGCCTACAGCCATTATTTCCAGAAACCACCAACCGCTTCTAGTCTCTCCTGTCAAAAAGTCTTAAAGGTAGGTTAGTCCACATATAACACAAAAGTGCTATCCATTTTTTAAAGTTTTCCTTTATAAATACAGATTTGAAAAAAATCTTTAAAACTCACTTTCTCAACACAATCTCTGCTGTTCCATCACATTCAAGTTTTTCTACTCTTTTTAATGAAATAAAAGACACAGGGTACAGATTTTTCTACAAATCAAACCTGTTGCTATATACTTCATTCTCTACCCTTTGACTGTAGCTCAAGTGGGAAGCATAAACA

SEQ ID NO: 115 - protein, 1344 aa, Homo sapiens
GAAAGATGAGGGTGGAGAAGGGAGAAGATTAGGAAAACTTAAGTCCTTCAGAAAAGAGATGGGAGAAAAGTTTTTCAACCAGACTTTGCCCATTGTATGCCCTCCTGAGGGAGTTTAGTTTGAACTTCAGGTTAAAATGCTTACTTCTCTTAACCTCTGGTTATTAAAAAAAAACTGGACATATAGTTACACATTGAGGACTACTCTCCCAAAATATTGGGGAAAACATGTAGCAGAATCTTGCAACTTCTAAACTTTCTGACTTCAAACCCCAAAGTACAAGTCTTACTTTTCCTTCCTTTCTTTCCTCCTCTCCCTGGCCCCAATCTGCTGAAGGTGATGGGCCAAGCCCAAGGGCCTCAGCAGCCTTATAAGGCAAGTGTTCTGAAAAACCTTCAACTCTTAATTTTAACATTAAAGAAAAAGTTGTAATCAGACTTGGAGGAAACTTAGCTTTTTTCCCTCCCTCCTTCCCCCTTCTGGGGGTACGAGGTTGTTTTTGCATGCTTCATTTGCTTCTTATCCTGATAGGCTGCATTAATCAGTTTTATTTCCATTGATAGAGAAACCTCGTCTGTTCTGTTCGAGCTACAAAGCGTCCTGCGAGCTTTTGTGAAAGTGCAAATCAGTTTAAGCAATTATCATACCAGGAATATGAAGGGGAAAGAGGAGGCCTTGCCCAGTGGTCTCCTTTAATCTCTTAATCCACGGATCCAGGGGGGCTGCCTGGACATAATTTAGGACAATCTCCCCACCCTTTACACTGTGATAAGGCCAAGTTACAATGCAGGGCAAAAATACAAGCTTTGTTAACATCTTGCCTTGAAAAGTTAAGATTAGACATTCCGTGCACGTGTGGGGACTATAGGGCACTATGGAAATTTTTTCTTTTTTTTCTCCTCTTCTCTAAAGCAGAATTCATTCTCCGTCTCTTTCTCCTTTCCCCCATCTCTGCCTGTCTTCCACCTCCCCTCTTTCCCCCCATTTCTGTCCCTCTGTAGAAACCTGGCTGCTCATAGTGCATTTTCACAGACTCTTCTTGGAAGGTGTGTGTGCCGTGAGGGGATACACCGCCGCCGGGAGTTGCCGGGGGAGGAGGGAGACGGGGTGGCCTCAGGAGACCCGGGCTTGCGTCTCACAGGGACAGGTGCGCCTCGGGGTATCCTGGAAACCCTCGTGGGGCTTCCAGGCGCTTTGACAGCACGACCCTCAGTGACCACCAGCTGTCTCAAGCGCTTTGCAGTCAGTGCTCCCGGAAAGCATCCCTTTCTCTTCAACAAGTACAAATTACCTTTTCCTTCCACTCACCTTCCAAAACCCGGAATACCTCAAACACCGAGCTCA

SEQ ID NO: 116 - protein, 1631 aa, Homo sapiens
TAGTGGAGGCAAACAGAATGCCCATTTGTTTTTTGGCCTGACACCTAGGTCATCATTCATGACAGCTTGATGCACATTCACTGATTCCAAGTGTCAATTGAGAATGGCTGATGCAACAGCCCCATAGCACTCACATTTGTTGGAAAATTCCATGTTGATCTTTATATATATACATATATATGTATATACACATATTACATATATACGTATATATGTATACACATATATGTATATATGTGTGTATATATGTATATATGTATATCTATGCATATATATGTATATATAATGTATATACATATATACACATATACATATATACACATATATATGCACACACACATATATATACACACACACATATATATATACACACACACATATATATATAACAGTAGTTGCTTAAGCTTCCAATATTGGCCTCTTCGGTCATGGTACATTATTTTGAGTGTTGGGAGTCAGTATGCCTGAGGTGCAAAGATGATGATGTACTTCCTGTAGACATGAAGGCACTCAGAAATAAAGCAAGGCCATTGAACTGTCATTTGTTGTTCTTCCTACTCAGGCTTTTAAAAAAGAAACTAAGGTCAATTAACTGGGAAGCTTAACCTCTCTTAGCTTGTCTTTCTTTGCGTAGGCTTTTAGCCTTTTAAATAAATCATTTTTTTCTCTTCTCTCCCTCCCAACCCCCTATCCATTTTGAACACGTTCTTGGATTTCTCATGCTAGGCCTAAGGAGCAGACTGCTTATATTCAAGAATGATTTGGAGGGGATAAAGTGTGCAAGATTTTGAATTCTTGCCATAAGTCCCTGGCAGACAGCCAGGCAGCCTCAGAGGAATAAGGCTAATGAAGGGAGGGTAAAGAAGATCCGGGAGTGTGGCTGGTAATGCAGTATTCATTTAATTGGGAGCAGGTACCGGTGCAAACTTCTCCATTTTAATTGGAAAAAGGGAAGGGGATTGTTAAGGACGAAGGAAAAAAGAATGCATAAAGTTTCCAAGCCGAGGAGCCAAAGGCAGCCCTGTCTATGCCAGAGAAAGAACTCAATTTAGGGCAATTTGCTCTGCAAGCTGGGCTGCAGCCTCCCCTGGGAATAGGGATGAGGAAGAAAATGAAACCAAAAGAGAACTTGATAAAATCACCTAGCACAGACAATCTCGGTAGAATAGGTTTTACTGAGTTAAATCTGCCCCAATCAATATGATTCTTTTCATATAAGTTACAAATAAAAAGCCACAAGATTACAATAAAAATCGAGACTCGAGCGCTGCTGATGTTGCACCTGGGAGTCTTAAGAACTTGTTATGGAATATATGTTTTTGCAACTATAATGTTTGTTTTTCCTTTCACCCTGGTCATGTGAATCAACTGTTTGCTTTCCTTCTCTATCCATTTAGTTTTATATATTGTTTTTAAAACCCAACAGAGGCAACTCTTTCTGCTTAATTTCTCTTACACTAGAGGTTGGGGATCGGTGGTTTCATTTTGTTTTCCAATGTGTTGAATCTAACGTAGTTCTGATTTCTCATACTAATAATAAATGAAGAGATTTCTTCTTATTGTATATTTTTGTGATGTAAGGAATTATAAATGTTAATGTATGAGTAAAGGAATAAAAGGGAGGCAAGACT

SEQ ID NO: 117 - protein, 1301 aa, Homo sapiens
CCAGAACCACCAAGAGAAGGTCATTGTGAACTCAGCCCAGAAGACAGAACTGACGATTCGGTGAACAGGAACAATCTTTGACTCCTGTAAGGAATCCCGCCCATCCCAACACTGCTTAGGAGGAAGAGGCGGTTCCCTTTTTTGAGAACATATTTTCAAAGCTATTCTCCAAACTGTGTGCACTAAAAAGAGCAGTAAACACTCATCTCAGTAAAACTCCTTAAATACAAAAATATTTAGTATGCCCAGTTTGACTCCTCTCAGTTATTTTTTTTGTTAAATACTCAATGCAGAGTACAATTTACTTCTCCATTAAAAAAAAAAAATCTTTTTTCCATTCTGTTTTGGTTTTTGGGTTTTTGTTGTCATTTCTTCCTAAAGCACTGTTTCCTCACATTTGCATCTCCCAGCCTTTTTAATGTGATATTCCATTTAAACTGCCTTTTAATTGTATGTGCTGCCTTGGCAGAACATGACTGATGTACTCGCGTTAATTAGGGCTCCAGTCAGCAGCCCGTGCCAGCTGGAAACTGAGAAACAAGCGTAAATTATTCTGTCATCAATCAGCTCGAAAATGTTTGAATCACTAATTAGTTTGCAATTTGGGTGACAGTTTATCTGACGCAGGCGGTGTCAGAAACTTCAGATCTTAGATGAATAATTTGCCAGGAACAAGCACAGATTCCCTGCTTTTAAATACATGAAGGTTTATCTGCATGTTGAAAGGTGGCTCAGCAGTCTTCATTAACTTCCAACTGGGACTATGTAAATCAGGAATCAGTGTGAGCCTCTTCAGGTCATGGTGGCTTAGCAGATGATATTTAGAAAAAGAAAGCCTTTTTTCTTTTCTCTTTTTTTATTAATAATTCATAAACTGATAGACAAGGTTGTTTAGGCTTTAACTGCTTTAAGAAATCACAATGGTTTTCAAAAAAAAAGCAATCACCCCCTTTTACATGAAAATTAGTTGTGCTGCATCTTGCTGTTTAACTGATTTATTCTCCTTCACCATCACGTGACTGGAATGTTAAATGGGTAGTGATTATTAGCCCTTGTCCTTTCAAGAAGGATCGTTATTGGGGTTTTGTTAAATGGCAGACTTATGTTTCTGCTTCAAGGGAAAGGTATGTAGACTCGGGTGAGGGCAGGAAGGAAGAACAAGCAGTAAAATAGAAAAGAGAAATTTTTGTCTAAAAGCAACGTAAAAATCTATTATTTATTCAGTTAGGGGTGGTGGAACGGCCCCTTGTTATTTGAATCAAGGAGCTGGCCTAAGTAGTAACTCCCAGCATTAACCATGG

SEQ ID NO: 118 - protein, 1557 aa, Homo sapiens
TTCTGCCTCACTCATTTTCCTAATAGGTTAATCCTCTTCCCTTATTCATTAAAGTCATTGTTTTCTGTTAATACATTTTTTCTACTTGGTTCTTCTATTCATTAGCAAGCACTGCTTCTTTCTGACTGTGCTCATAGGTCATAAAGCAAATGAGAAATTTTCTTGAGCCTCGTTCTTAAGGGATGCAGATTGCAACTACTGCTGTGCTATACGCTGGAGGAAAGAAATCACATAAAGCGATTAGAAAGGAGAAAAAAAATAAGTGAAACTACCTTCTCATGTACTTCAGGGTTTTCCTCCCTTCTGAGTTTAATATGAATCAAACAGGTGTGCATTCAAAGCATGCAAGTGTGTCTTCATTGGCTTTTAATCATCAGCTTGAAGAAAATTCAGATCTCTCAGAAAGAGAGAAAAGTAAACAGCTGAGCACTGTGACTCATTTACACTTCAAATATACTTTGAATTGGTTATTCCTCAATTAATCAAATAGCTGGTGTATCCCTAAAGTAGTATAAAGTGACGCACTGTGTGAAATCAATTTTTCTTTCCAAAATCATTAAATCCAGTAGCCTGTGACTACATCCCTGCTAATTCTGGTACCAGTCCTTTCCTCCTCCATTAACTTTGGCACGCCTAACAGCCTGTCAAGAATAATTTCCCAGGACGTAAATAATTCAGAAATTAAAAATTAATAAATAATAACAGAGAACTACTGGGAAATAGGCTGGGTCAATTAGTGCGCTCTGCATTCTGTTTCTTCACAGCAGGGGGAGGCAGCCACATTCGTTACTTGAATCTTCCTTTCGATTCTGCAGTCTGATTTACAGCTCTTCATTACTGGATCCAGTCAGACGCAATTACCTCCATCACTATCTCAGTTCCTAACTTCAAAGAAACGAACGTTTTCTTGTCTGCTTTTTTTCTCCTTGAAGCAGGCTCAGCTTGACATCCCTGGAATTTCTACCACGCAGACTAATTAATAAGTCTTCGACTTATCATATTCACTTCTCTTCTTTGATGTGCTACCTTAGTCAATCATCCCATTTAATTAGAATTTCAATGATAACTTTACTTATCTTGTGGCTAGATGTAAATTAAAATAATGGGATTTTAATTCTCTTTCGTATGGGGTTATGACATTTTGGAAGAAAAAGTTTCAACACAAACATGATATTATGTACTTTTTACTTTTCATGTGGGGGTGGGGGAGCATTTTGCAAAATTATTTTCTTCTTGCTACAAAAGAGTATTGCTGTTGAGCAAGCAATAATGAAAATGCACTGGATTTTTCTATAGCATCTTTTCACCAAGCTTTCATAGGAAAACAATTGTCTTCATTTGCATAAATAATTGGAACAAGACACAGGACGTGGAACAAGACACAAAGGCAGTGGCTACGTTTTGGGAAAAAAAAAAAAAAAAGGATCTCCAGAAAGTCAAGGAGTTGACACACTAACCCTTTTAACTCTTTTGCCCTTTTCTGTCAATCCATGCTATGTTTCCATTTTGATAAATTCTATAGTGGTTTTTCTAGAGTTCCCCAAAATAACACAAGGA

SEQ ID NO: 119 - protein, 1639 aa, Homo sapiens
CATAGCCACCCCTCTGAGATATTCTTCCCTCTGCTGATGTCATGTGGTGTGGAAACCCTCTTCTCGTGGCTGAAAACAATCCTAAAGAAAGTCAGCCTCATCTGGGGAGGGGGTGCAGCGGGGGGAGAATGGGGGAATGTCCCTGGCCAGGAGGCCGGAGGTGCCCCAGGAAGCTGTTTCCTCTGAATAGTTAAATGGCTGCCTCTCAACTTGCACAATGTCACATTGAATTTGAAACAGGGAACTTTTTATATTTTTTCCCTGATTGTGCTGGCACCTGGCAGATGCCTATTTACCACAGGCATCAATACACATAGTAATCAAAGGAAATCAGAGGCACAGATTAGCAACAGCTGCAAGTCATTAGTGACAGACACGGGAAAGCACAATTCTGCACCCAACTTTGAAATAACCAATATGAGTATTTCAGAGCACGAGGGTTACCGCAGGGCACTCGCTAACATGAGAGCAGCCAAACAATAGCTGGGCTTGTCTCTCCAGAGAGCACTCTTCTCAAAGGCAGCACCACACACTCCGTATTATAAACCAATCAATCACATGATATTGGTCCACTGAACGTTAGCCCTTTGCAGAGTCCATGTGCTGATCTGATCTTCTGACCAAAGGTTGTTGAACTGAAAAATAACCTCTGGCTGGTGGAAAACTTTGTTATCGCCTGTCATAATTTTAGTGGTGGGAGTTTGAGTGTATTTCTGATGACTTAATTATATGATTGACCTAGTTGGAAAGGGGCATATAGAGGGGAAAACAAGACATTCCCCTTTCGCATTTAATCTCATTTTTCCCCAAATTTCTATTTGAAAATCAGCTATGATTGATAGCCGTTCTCTTGGTAGTTACATATTTTCATTGGCAACACTAACCTTAGCCTACTCCAAAAAATACTATTCAATTTTTAGCTTTTCCCTAATCAATTCATTCAGTGCCTCAGTGGAATACAAGTTGGTCATTTAAAAATTTCTAGCTGTTGCCTGATATGTCCCAAAACAAATTTAGCCAGCATGGGTTTCTATTTTAGACCATCTCTGGAAATGCAGATTTACTGTACAACTGGGTAATGGCTTAGAGATAAACAGACACAGTGAGCCGCTGTCTGATTAGCAGGACTGGGCGAAATTTAGCATTATATATATACTGCAATAATTGGACCATTGCACCATAGGATGTAAAGTAAATTGTTCTCAGTGCCATACGTGGGCTCTTCTTCTTTTACTTGATACTAAGGTTGGATTATTTCATTCTGTTTTAGAAATTTCTCCTTTTTCCCTGCTCTCCCTACTCAAAAATTATCTTCTGAAGGTTTTTCTAAAAATTCTTCTAAGTAAGTTGTTTTGGAGATTAGGATAAGAAGGGAGAAAATGCTGCCTTTTATCTGGTGCAGAGCCAGCCATTAAATATCAGCTCTTTAACAACAAGCAAAAAGCTATTATTTTAGAAGAAAGCTGCCAGAGAACATGGATCCCATAGGGCATCTGCCACATCATAGGCATTCAGATGCATGTTGTAATAGTCATATATGTTGTTTCTTTCCACTGTCAGAGTCAACAGATTATTTTATACTTAACTAAATACCATGATCTCTTAGTTTAGGGAGATTTGATTTCTTCAGGTCATTTTG

SEQ ID NO: 120 - protein, 1535 aa, Homo sapiens
TCCCTCACAGAACTCAGGACTAAACCGGGGGCTAGGAGGCCTCACATCTCGGCCCACTCCGCGGCAGCCCCGCGCCAGCCAGGAAGACGTTATCCGTCCATCGCCGGAGACTGTTCGTGTATTAGCAATTCACTGTCAAACGCTCAAGAGTTTGCCAAAGCATAATAGATGCTTTACATTTTATGCATAACTAGTTCTGAGACCAGGGCTATAAAAGTTTTCTATTAACATGTAAGCACTAAGACAAGTTTTTTTTCACTTGATAAATATACATAACTCCTTGACAATGAGGCCCTTGTGTTGCTAATGGGGCCCTTAATGGAGAGTTATATTTCCAGGATTATATCTTTATTCAGTTGCAAATGATTTTTGGGGGGAGTTTTAATGCTCTGCTCCGTCTATGAATAATAGTATCGTTTGAATGCAGCGGACACCTGGTGCCGGAGGACAGTGGGGCTCTGCAGTGACCTGGCGACGCTGCCAAGTTCGCATTTTCCCAGCCTTTCCTACCCGCTCCATTCAGCATCTAATTTCATTCTCCCTCAGCAGAATGCTAGACACTTGTAACTTTATTCTCCCTCCGCAAAAACTTGCTCTCTTGTAAGGAAAAAATCCTGGAAGAAAAAAATTTCTCTTATCAATCTCTTCTTATATAGAGTCTAGTAATTTGAAGGCTGGCTAAAGTTTCAGGAAAAACCTTCCAATTAAATACTGTAAAAAGATAAAATAACAGTGGCCTTGCTGCTGCCCAATAGCTTTATTGAAGCGCTCTTTTGTTGATTTATTGTACGTTAGCCACCGAGCCGTGCAAAGAACATTACGTTTCAGAAAGAGCTATTCGTATGCGGCCTGCATCCACTCCAAAAACAATCAGGCCTGTATTGCGTTTTGCAAATTTATACCAGGATGTTGGTTTAGAGTGTTTCCCTGAAAAGTTTTTCAAGTAAGTGTCTGCTTTCATGGGCGAGAGTGATTGAGGCACACAAACAAACCTTTGTTTCAAAACTCACAGATGTATGGCCGGGCTGAGCTTTGTTTTCCCCTTTAAGAAGTATTCTCAGATTTGTGTTTGGAGCACAACACAGGATTGTACAAAAAAAAAAAAATCAGCTTGAGGATGAATGTCTCGTATAATCTGAGGCTTTTCCAGATTTTCCCAGGGTTAATTTTTCTACCCTGAACTTTGCGTGTTGGGTAGGTTAGGGTTTTTTTTTTTTTCTTTAATTTATTTATTTGTTTGTTCGTTTGTTTTTGTTTTTAAATTCAGGCATGCCATGAAAAAGAATCCTGCCTACTTCAGCTTTGAATGTGGCTTCAGGAAACTTCATTTCAAAGCTATTAGGGAGTTTGCAAGCTCCATAAATATACTTTTGTTCAAGTTGCAATCTGCCCTTCTCTCTCGCGGGCGCCCGAGCATCGTGCTGGGACATCCGGCAGCCCCAGGCTGCGCGACGTGGAGCCAAGAGGACAGCCACCTGGGTCGGGGCTGAAGGAAATCCTAAGTGACAAAATATTTAGACTTCAAGGCAGGCATC

SEQ ID NO: 121 - protein, 2982 aa, Homo sapiens
GGACTCATTCTGCTTCCAAATTTTTACTTTTTCTTTGGTCAATGTGGGAACCCTCTGACCAGTCATGAAAAGTAGGACTTGATGGCCCGTCATATGAAAAGCTATTAACATAGCCACAGTTGGCCCTGAAATATGCTTTCAAGAATTTAGAAGATTTGCCAACCCCTATTTGAATTTTTCTTCAGAAAAGTGCACTTTTATTAACACCCTCTTCCCTACTGTGGATGAAAATGGTCACAATATTCTCATGGGGAAAAAAAAGAACATTCTCAAGAGCCTCTGTAGATGGAGAAATAGAGTTTCTGGCCAAGAATAAAAATGGGGAAGTCTAAAATGTTTAGAGCCTCTGATTAAACCTTCAGTGGTATATTTCTCTCAGACAAAGCATTTGTCACAAGTAGCTTGTCTGCTTGAGTATGATTTATGTGGCTGGACTGAAATTGGCTGAATAATTTATGCTATTTATTGTTCTGGAAAGTTTCTTTTCTTAATAAATAAATAAATAATGCTGTGTTAAGAGAAGAGGAAAATAGTGGTAAATGTCAGTCACATGAGGAGGGAAAAAGTTATTTTTCCATGTTGGAAGCTAATAAAGTGTATCTAAGAGGAATGGTCCCCACATAGAAGGGCAGGACTCTAATAGGTGAATATTCTCAGCATTTTGAATGAAACCAATTGGCTAAGAGAAGCTGTCAAATAGGTGTGAAATGAGCTAAAATTACGAGCGATACACTTTCTTTTAAGGTACTTTGCTTTGTTCCTTACAGTGCCTTGCAGCAAAAAAAAATTTTAATTTAAATACTGAAAATGGAATGCAGCTATATTGATTTAAATTCACTAAGCAAGTATTGGAATCTATTTCCTGTTTCCTGCATAAGTGTGGAGTGTGTGTGAGTCTATGTATGTGCTCGCGTTTGAATGCTGTCAGCTTTCCTACTATTTATGAGTGAGTCACAGTTTATTAGAACCTACCACAATGTATATTAGCATAAAACACATAACTTGAATTGTCAGTTTATAAAATTTTCAGAATGTATGATTATAGTTCTGTTCTTACTGTAGATTTTTACATAGCTCCAATGATTTATCCCACCTGCTGAAACACTGGGCTAATATGAAACCTTGCTTGTTTTTTGTTAGGGTTTGTTTTTGTGTGTTGGGTTGGGTTTTAGGGGTTTTTTTTCTCTTTGGTTACCACTTTATCATATAAATTTTATTCCTGAAACCTATGCCAAAGACAGAGTTATAGACAAAAGAATGGATGGATGAGTGTGCAGAAATACATGTGGCTCAATTCAGCTGAAACTGTTTTATAGATAACTCACTGTAAGCTATGACTAAAAATATTTGAAATGTTTACAGGCTGCATAATATATATGTTTGACATATTAAAGGAGACTTCTATCAGCTGCTCAGTAACCATTCCAGAAAAACGCCTTAAAAGAACTCAAGCAAAATCACAGCCCCTCATCTGCAGTGCTGTTTCTAATTTGAAGGCAAATTCATCTCTGACATACAGCAGATTCTGTGCAGGTGGAAGCAAGCCCCTCTCTGCTCCTCTCCCTGCCAGTCAAATTATGTCATCAGTGAAGGATCACTGGTTTTTAATGATACGGTGGCCTCCATACTGAGAAGCAGTCCTAGCAGAGCAGTATGCATAGCCAATAAAATGGCTGTCACCAAATTACAATTGACACTTAACATCACTAAATCTGCAGTGTAATTCCTTGTGACAGTTGTGTAGGTATATTAGAAGAAAATAATTTACTTCAAACCCAGCATGTTAGACACATTTTCCTGAGCGTAATTCATGTCACATTTACAGTAGCCAAAGCAAGCAGTCTCGAGGCAACCTTAATGCAGGAAGAGATCATAGATACTAACATGTTCATTGAAGTATGATTATTTATGCATGCAATAAACAAAGCTAGAGCAGTTGTTCATTGTAGGTTTTAATTGTTATTGGGGGTTTTAATTGTTATTGGGTTTTAAATGAATATTAGCCTCTTTTGCTGTAGGGAATAAGAAAAACTATTAAAAAAAACAAAGCCACATTTTATACGGAAAACAGGCATCAGCTAAAAAGTCCGTTTTTCAGTATTAAATGGACATTCATGTGGCCCTCACTCCTACCACAGCTCCATATTATATTTGGACTTGAAATTCTGTGCCCATTACCACATGACAAATGTATACACATCCATCTTCCAAAACGCAAGTAAACTAAAAACAAGCCAGCAACTGTATTTCTCTTCTCTCAGAGTATTAACATTGGGGAACAAAGGTTTGTGAGGCAGACTCAGTTTCTTCTGGAATGCTATTTTGATACATTCATCTGGAGCAGGTCTGCAGAAAGACCCTTCCCTGGCCTTATAAGCATATATAAATATGTGACAGAGTTAAAGGTCTCCACTCTTCAGAATGAAGTGGTTTGAATGTCTGGCGAAATGGGACTGCAAAAAATTCATTCCAACTTTGTCTCTAGGCAATTCACCTTTGGCCCAGTGATGATATGAGTCTTTCTGCTGATGGAGGAGATATAATAAGTCAGCTCAGGCAGTCTTTAGAAGGCAGGGGCCTATTTGTTAGCAGAATGAGGCAGGTGTACTCTTCTATGGGAGATTAGCTCATCCCAGCACGATAATTACCTCACAGGAAGCCCTCAAGGTTACACATCAAATGCAGGAGCTGCAGATCCAGTCCTGGAAATGGGCATGCCTGTATCGTTAAGTAGTCTTACTTTAGAAACTCCAAATTTAAAAACACAAATCAGTGAGTGATAATTTCCCTGTCCTTTCATCAAGACATTAACACGTCTCCAGCAAGTGCAAGCTCACTGAAGAACAATAGCCTGGATTACAGCTCAGCTTCGAGGTGAGGGAATTAACCTCTGTCTGTCTGTCTTAGTTGATTTTCTTATCAAAGTGAGGAACTGCAAACAAGAAGTAAGAGAACCCACATTTGACTGGCTGAGGTCCTTTA

SEQ ID NO: 122 - protein, 1408 aa, Homo sapiens
GGAGGAATGAGTTAAGGTGGAGGAATGGGGCAAGGTCACGCGCCCCGGCACTGGAGGGCCAACCCCGGCACACAGCGGACTGGCCGGGACTAGGGCAGCGCCGGGCTATGGACGCGGACGCCGGCGAAGCGCACCCCGGGACGTCCGCATATTCTTTCCCCCAAAACTAGTGCGCTCCAGCCGGCGCCTTTCCTCGGAACCTAAGGAAGGGGTATATTTCGTTGCTTTCTTTAAACCTCAGCACGATCACAGTGGCTCCGAGCCGCGGGCGGCTGACCGCGGGCCTCGCGGGCTACTCCTGGTAGGGGCCTGCGCGAGCCTAAGGTGTGTCCCCGCCTGGGTTAGCGCTGCGCTCTGCACTGTTTCTTTTCCTCTTAAAGCTTCTTTCTCACTCACTCTCTCCCTCCTTCTCTCTCTCATTTTTTCCCCATTTCTCTCGTTCTTTTATTCAGCTTTCTCTCTTTCTCTCCCTTTTGTGAATGGGCCGCGGTGTCTTTGTTCTGTAGAGAAGCGCCCGTGTCGCTGACTTTTGTGAACCAGAGAAGGATCTTGTAAAACCTCCTTTTCTCCTTCGTACGCCCCCACTCCCACCCCTCCTCCCCTGCCTCTTTGATTAGATGTTCCCTCATCGTCAAAAAAAAAATGTAATTTCGTTGGTCTGGCGGCCACTTTCTTTGAACATTAGCTCGCTTTCAGCTCCAACTTCAATTAGAAGGAGTTGATTTTGAGAGATCAACAAAAGAACCGACCAAAGCCTTATTAAAGGTCCTAAGAAGATCTCCCGGGTCCTTTGAGAAGCAGTTAAGGAAACAGTGTGCCCTCCATCATATTCTGTTACCGTATTTTATTCGGACTCCAAAGGAAAGTGTCGCTTGGGGGAGGGGGAAGCACTTTGATGAGCGGCGGCCGCGGCCCCTTTTCACTCAGCGGGCTCCCCCTTCGTTCTCCTCCTCCTCACCCAGCGCCCGGTCCGCTCTCGGCGCCCGACCCCGCAGCCCGGGCAGCGCGAGTGCTCCCCACTGCGATGCGCCTGGAGGCTCCTTGACTTGCCCTCACACTTAATCCTGTGCAAACTTTTTACCCCGCCTGTCGGGGTGGGGGAGTGGGGGAGATTAGAAACAAGGGGTAGAAATTCCTCGAAAGGGAATAAAGTGCCTAATTTTCAGGAGGAGGTGCCATTTAAAAGATTCGCCTAGCTTAGAGTTGGAACGAAAACTCTTTTTTGCACTTTTAAAAGTCCACCCAGGTAGACGTGTTTGGGAAGTTTTTTCGGGTGGGAAATGGGCTTCGCCCGTACGAACAATCCGGGGAAATCGCCTCAAGGAGGATCCTTACGCAGCATGTGGAAAAAAGTTGAGGGCAGGGGTCTGTGGCCACATTTTCCATCAAAAAGTCCCTGTTAGAGGCA

SEQ ID NO: 123 - protein, 2672 aa, Homo sapiens
TTTTGGAGTATGAAGAAATAAAGGATAAAAGATTCTTTTCTGTGTTTTCCTGTTTCGTTACTACCTGGTCATGCTCCTAGGCCACTGTCCATCAGTACTGTAGAGTTAGCCTGTTGACAGTCACATGTCATGTGTTGAGTGCGTAGCCAAGGGATTTTCGTAGAATGCCTTTTTTGTCTTTACATTTTTCTGAGATATTTTATCCAAACCAAGGTTTTCTTTAGCAGGGATGGTGATCATTTTTATTTTATTTATTTTTTTGTTGGAGAATGGTGTAAAGGTGGGTAATTTTGAGAGAGAGGAAATAGAATGGTAGTGAGTTGAGGGTAGGAAAATACATCTGCAACTTTTATTGTTTTTTAAATGAGCATCTTGATAGGGAAGATAGAATGGAATTGTCAAAAATTGTTAATGTGTTTGACAAAGTGTGGCTGTCAGTATGATCTTTTTGTTACATTTTGACATGAACAATTGTCCTTTTATTGGGGCTGTTAATGCTATTTTAGAATATCATGAGCATCTGAAGGCAATAGTTTAGCAGTGTCCATAAAGCATCAAATACCATTATAATATCTAGTAACCCTAACAGCAATATTTCAGAATCCCTGCCTGTTTAAATGGGCTATCTGTGAATGTACTTGCTCAGGGATGCATGACCCACATCACCTATAAATTTGATTGGAAGCTAACAGTACTGGCGTAGCCTGATGGATAGCAGATTAGAGCCCTGATTAACCATGTGATTCAAAGACTGGGAATATATTGTCTAAGCAAGATTCATCAGATGCAATCAGAATTTCAAGTGGTCAGATGAAATTCAAATGTGTGTTGTGGCTTTTCCTCCCCTATTGCTTTTCCTCCTAGGTTGCCTTTTTTTCCTTCTTTCCCCAAAGCTGAAAAATACTTCTTTGATGAATCTGCTCCTTACCCTAAAGCTGTCTGTCTGTTATTCATCAGAAAGCAGGTCGCAGTTCAGTGAGCAGAAGAAAAGATTTTAATAGAAGCTGTGCCAAGGGCTGTAATGCATCATTTTAGGGCCCTAATTACATTACAATGACAAATATCAATGGTGACAACAGCAATAACCTACATCCTTTAATGGCTGTGCTGGAAAAGGAGTTTGGGCCCCACGCCATTATATTAGACTCAGTTTCAAAACATAGGCCATTAGAAGTGTGTGTCCACAGTGTTATTGGCTGATCGCTAAAGCCCAGTGGAAAGGCCTGTAAATAAATGATGCCTCCCTAAAGCTGGGTCCTGTGGGACAAAAGAGGCGAAATTAGATGACCATGGGAGCAGCAGTGTTTCCGAGGCAACTTTAGATTTCAAAGTGAAGAATGACCTGCTTAATTTTATGAAATCACACACACACCCCACCCCCCCACTGCCAATTAGCCTGACCATGAAAATCCATTGGCATGACAACTTAAAGAAATTAAGAAGTCTTTTAAACAAAAGGAGATCTTTAACGGAAGTTTGGAAGGTTTCTGCCCTCCCGTTTCTGTTGTGTGTGTGTTAACCTATGTGATTGAATAAAAAGGCTCTTCTCCTTTTTACATTTATTTTTAAGAAAATGTAGAATTTTTTTAAAAAATAGTTGCTCAGACTTAATACAGCCTAGGTCCAAAATTTTATTTCACCAGATGAATAAGTTTCCTTAGAGTCGTTTTTATTGCCTAGATTATGTAGGCGAACTAAAGAACTCAGTTTTCTTATGTGCCCACACATTTTTCAGCCCTCCTAGCAAGGGACTATTTTATTTATGTAAACAACATAATGACGAAAATATGCTTGGCAGATGGTTCTAAGCATTAGAATCATCAGTTTGGTCTGCCCCAAAGTGTCTCATTATCTTTTATTCTCTCCCCCTCCACCTCTCCCTGCAAAAAGCTTAACAACCAAATGCATTTGAGATGCTGTACTTTCAGCCTGGTGAATGCTACTCTATTTTTATTGCTCACCCTGGAATTTCACCCCATAACCACTGTGGTATGTTCGTCCAGGTGGAGAGTGGTTTGGTGATTCCCATTGCAGCTCTTCATGGTGGCTTAAGCATTCTTAAAGGATGGCTAAATGCTCCATGGGGCCAGTGCAGTAAATTAAATCAGGTCAGCACAGTTGGGTCCTTATTCACTGCAGCTTATTGGTGCTGGGTTTTTGTCCATACTGTTAGGAATGCAGGCTGGAATGGAAAGCTTGGATTTGAAACTTCATGGTGAATTTGTGTTTTCTTTTGGCTGGTAAAGTTTTTAAGGTGCTGGCATTTAAAAGATTGCATAGCTACACAGTTAGAAGGGTTGCTGATGAAAGAAGGAAGCCTAGATTGCACAAGTAGAGTGTCACTGTCATTCTGGTAATGACTTGGCAAGAAAAGGCATTTTGGGCCTCACATAAAATGAGGAACTGACCCTGGATGGAATTTAAGAATGTCTTAGGGATAGTAATTGCTTTACATTTTCTGCCTTTCAATTCTTCTTAGCTCTCTTTCCTCCATTCCATCATTAAAATATAAACTATTTTGTATGTACGTGTATTAAAAAAAACTGTGTATTTATACATCACAAAATATACAAGGCACCATCTGAAAAATACAAATTAAGATAAACATTGGTAAAACTGTGAGTAACTTTTTAAAGAAAACATGTAGTGGTGGTTTTTCTTTTAACTTACTG

SEQ ID NO: 124 - protein, 1358 aa, Homo sapiens
AGTGGGTGACTTTGCCAGTTAGCAGTGTTCTGCTGCTGCCTCTGTGCCTGAGGCCACTGCCTGAGCCTTCCTCATGGCACAGCAGAATCCATCCAGCTTGAGGTCCACTTTGACCTTCTGGTTTTTTTCAGCCAAATGCATTCATGTTACTTGGGAAATACACCATCTACACCCAACTCTGCTTCCCTTCCACCTCTACTTTCCACTCATTTCTCAGCCCCTCAGGTCATCTCTGCTCCTCTCCCGAATTATTTGTGCTTTCTTCTTTCCCTTCTTCACCTTTGCTGGCTCCCACCCTGAGATACTTTCCACCTCAGACCAGGGCAGAAGGGTTGGGAGCGGGCATGGTGTGGGCCCAGCCAGCTGCCGTTCATCCAGGGACAGAGCTGCCATCTGCCAAGCTGATGGTCCTTGCTGGCCCTCCCCGTGTCCATCCCCTCCCAAGGCCCGTGTTGTGGGCCCGTCCTTTTGTTTACGAAGCCCCTGCCAGACCCCTTAAATTGCCGTTAATGTTTCAGCGTAACGAATTAGTCTCTCATCACGAATCAGGCTTCGAAATGAGGGAAAAAAGCCCCGGTGAGGCCATCCTCGGAAATTGGGGTCATTCTCATTTGCAAAGCGGAGGATCGGAGCCCCGTAATGCGGGCAAATTTATTCCGAGGCAGGAGCCCCGGCGTGATTAGGCCCTTTGTAATTATCGCTCCAAGAGATTCCACTCCAGCCGCCCGCCTCCCTCGTGGATTAGCAAGCGAGTCGGAAAAATACACAGGATTTAATTAGAGGCAAATTAAAATTGGTAATGAAATCGGGCCAGTTGCAAGTGGCAAGAGTTGGAAGGGAGAGAGGGAGAGGGATCTCCAGGGGCACGGGCTGCCTGCCCTACCCGCTTTCTTCCCCGTTTAGAAATGTAAAGAGGAGACAAGGATGGGGACGAGGCGGGGGAGGCTAAGGGAGGACAGGTAACAGGGTCCAGGGATGCAGGCAGGGATGGTGATAACTGGGAGCTGGCCGTGGGGGCAGCACAGCTGAGAGAGGAGGGTGCAGGGACAGGACTGAGGGACACGATGAGGTGGGGCAGACTAGGGCCCTAGTCCGGGCTCCCATGGTGGTGAGGGGGGAATTGGGCCAAGCACCCCGCCCTCGCCCAAGCGTCCTACAAACCAGATGACCTCAATTCTTGAAGTTATCCTGCCAGGAGGAGGTGGGACAGACAAGGTGACTTATCTTCTTTCTCTCCTCTTTCTGCCTCTGGGTTGTCAACCCACACTCTCCTCTCTCCCTGTTTATTTCAACAAGTATGTATGAGGCCTTTACTGTATACCTTGTGCTCTCAAAATATAAGCTGCCTGTTCTGAGCC

SEQ ID NO: 125 - protein, 1774 aa, Homo sapiens
AGGTGACCACATTTCTTCCTAATATTCTGAATAATAGTTCTATAAACCTGATATCTATGCCCAGATCTAGTTTCATAACACTGGAATTCAAACTTAGAGCTGAAATTTCCATGAAGTTAATTCTATCAGCATTCAGCCTCCCTTAGCTGTTTCAGGAATTCATCTTCGAGAAACTGTGCTTTTTTGTGTGTATTTGTCTTATTAAATCCGTGAAACTAAAAATGCTTGAACAAAGTAAAACATTAACACCAACTTTCACAGTAAATTATTTTGTGTGAATGAAAGCTTTTTAAGAGTGTAAGTCTTGGCATAATTACCCAAAAGTAGTTTAGTAAATGCCATGAAACATTACATCTGCATATCAAAAATGCATTCTGTATGCTACAGGAAAATTGTAGTACGGAGGCAATTTTCTAATATTTACATATTTATAGCAAGTGCCTGTCACAGGAAAGTTAAGCTCACCTGTAAAACTTTCATGTTACGTAACATGAAGAACGTCTCATGCTTGGGTGTTCTAATAACCATGATATTATTTTAACAATTACACTATTTAATACCTTGGATTAGTTCCTCTGATAGTGCTATTAGCTGTCACTATACTCAATAATAGGTGACTTCATCTTTGTTATGACATGATCTTTCCTACTGTTTGTTGACCTTTCAATACAAGGGGGAGGGGACGCTCCCAGCCCCCCAAACCTTTAAGCAGCTACTGTAAAGCTGCGGTTTAATTCTCAGCTGGAATGTTTAGAAACCCTTGGTGCTAAATACCTCAGTGGACTGCTTAAACACCAACAACAGCCTTATGGGGCCTTACCCGACCTTAAACACATCTTTTTTTGTTGAGAATATTGCATTCTGCCACAATTCTGTGGGCTAACCCTGGGCTCACATTAAATATACCAGCTTCATTGAAGCTTACTGAATTGAGTTGAGTTGTTCTTTGTTTTATTCTCTCTCTGCTTCACCCCCCACTGGGACTGGGCAGCCTTTCTTCCAGTGGAGCGTGCTTTAAAGTAACCCAAAGAAGAGGAGGGGGAACGGGGGAGAAAAACCAAAAGGTGCAGCTAAGGCCCGTAATTAGTCTTGATCCTCCAAGTCTAAAATATTTTAACGCCAGGTTTCTGATTGCAGTATGGGCAAAGTGGATTTGGGAATGCAGAAAAGTAATTAGGTCTGTGCATTGAAGTGTGGAGAGCATTTAAAAGTGAATGGGTGGTTACTACATTCTTGGCAGGCTGTTTTTTATCTTTTCATGCTCTGCTGTTGTTAGAGGTGATGGGTTTATTGCAGTTTTTGCACTCTGGAGGTGGCTATGTTTTTCTTAACCTAGCCTTTTGCTCTCCATCTCAAAAATGAATCCTCGTGGTGTAAGGAAGAACAAGCGAAATTTTTAAAAAATAAAAACAAGGCACATTGACCGAATATTATGCGGTGAAGCAGAATAAGTTGGGAATAAACCTCAATGCCGCAACAGGTCACTTATAAAGATTCTGGGTTTAATTAATGACTCACTGAGCACAGGACTAACGGGAGACAATGGTCACCCCAAGGAGAAGGAAAACAAAACATGGTATTCTCTAACCATGTTCACAGAGCCATCCAAACTATCTGGGGGGAAAGCTGACATCATTATGTCACTTCTGGGTCCTGGTATAGAAGATACAAACTATAAATGTCCGAGTTGTCAAAAATGCATGCTTTTGATTGCTTCAGTCTATAGAATTGCTGCAATTTGCTAAGATCACGTCTCTTCAGCCCAGACATTCAT

SEQ ID NO: 126 - protein, 1358 aa, Homo sapiens
CTATCAAAATTCCAAAGTCTCTACCTAGGCATCAATATTCTTACAAATCTATGAATTTTCTATCACACATTTTTTTTTCCACTAAAGGACACTATTTTGCTAATGCAAGAAAGCCAGTAAATAGAACTGAGCCCAAACTCTCTAATACCAAGGGCTATGGTGAGGCTGATCCAGGACTTGGTAAGTAGTATATCTTATTTTATTTAAAAAAATCGATATTTAATAGTCTGTTAGCTGAGCCAAAAACACACAGGCTGCAGAAGAAACACTTGTAGATTGCAAAGTGATATTTAAAGAAAAATGCAGACTTGATAAGCATTTCCATGTTTCGTATATTTGGTTTTCAAGAAAAGATGTTGAATAGGCCATTTGATATGTTAGCTGAATGCAGCTGTTTAGATATTTGTTTGGTCTACTATTGAATTTTTCATTAAAAATATGTGGTTAACAGCAGCCAACCTGATTTGCATGTGTGTGTTCCTGATTTGTTCACCGCAATGCCTCCCGTCTCCTACATCTTAATCACACCCAGGCGCCCGCCCCATTACATTACCAGAAGGGAAGTGATGGACATCCTTTGACTCTCTTCATGACCCCCTGATAATCCTGTTTCACACATAGGCTCCCTGCTGTAGGAAACACAAAAGCTGCCACTGTAGTTTTTTACTTCCAGTCGATATTCTGACAGACTTGATCTAGCAAATTAGTATGCTGTGGTAGGGGCACGACAAAAGACCCTTTTGACACACTCTGAATCAATACCAAGGCCGACAGAGAGCCATTTCACCGTAGTTCTGTTATTTTTCCCCTTTTGATGACCCTTTGCTTTTTTTCCCCAGCTTATATGACCTTGTCAGATTTAAAAATATAATGTTAGAAAAGTCATCCTTGCACACACATGTGCACACAAAGACCATGTAGGATATACTAAAATTCCTAATAACAATGTAAAAGAGAAAGGCAGCTGGTGACGAAATTCAAGTACCTTTAAAAAAATGTTTCTTCTTTCTACCAAAAAGAAAGGGAAAAATAGAAAATAATCAGACATCTTGAATAGCTGTGTATATTAGAGAATATAGTCTAATTAGGCCAGGTTAGTTTTCATTTTATGTTATACTTAGTTACTGGTTGCCTTCAAATTCTAAAACTTGTTAAAATGAAACATAATGTAATCTCATGGATGTTTTATATTTTAAGCTGTTCATTAGTTATATTAATCAAGGCTCCTGAGTTTAAAATAGAGAGCATTTTGTTAAATATTTGAAGTTAAAATCATTAGAAAGTAAACTTCAAATAACTATGGAGAACAAAATAAAGTATTAACAAAAATATAAGGTCTTTCCTTATTAACCTTTGCC

SEQ ID NO: 127 - protein, 2573 aa, Homo sapiens
AAAAGCCCAAACTATTCTTCAAGTTAACTTTGATGAAATATATTTTTGCCAACTTTATCTCACAGTCTTGTTGGTGACAGGTCGAGCCTTCTCCCACTCATCTAAGATATTCCATGAACATTTGTGATAACCCTGCAGAAATAAGTCCACATCTGTGCCGGCATCCGCACCTCCCTGCCCCCAGCCCAGTTAGATTTAATGAGGAAAGTGTACTTTGGGAAACAAATACGGTGGATCTGCCCAAATTTTGACTAAGACTCTTCCCTCATCTATAATCCATTCTGGAGACAGACAGTGAATTCACATCAATAAATGCTTTCGGGAGTTGGAAAGGGTTTGCTTAAGAAGGTTCATAAAGATAAAGGTAATCTGATCACTAAAACCATTTAAAGTTTTTAGATTTTTTTTTTCTTCTTAAGGGGGAATTCCCTTTAGTTTGATTGCAAGATAAGAGTTTTGTTGTTAACTAAGATAAAATATAGTGCTGAATAATCTCTGAAATTAAAAACTGAAGTGCATGGTGCACAGAATAGAGAAAATTAAATAGCTTAGACAACAATGGATAAAGAGAAAAGAGTTTTCATGAAAATTAGCTTAGTAAAGGTAAATTGCATTTGAATCTTAACTTCAGATCTGGGTGCTCTGCTATTTGGCATATGTTGAATTGATAATGCCTGTGTGTTAAAGAATTCTGATTGTTTCTTTTGCCTCTCTCACAGCTTATAAAAATGCAAGCAGACCCATCTAATGAATATTAATAGGAGTGATGTCTAGATAACACATAAACCCCGGGATCTGTGGACTTTGGATGGAGTAGTCAGAGAGGATTTCTGTGGCTTTATTTAATACCAAATTTACATACTTTTAAAGAATAAACATCATCTTAATATTTTAATATCAATATTCCAGAGTGGAGATTTTAGTCAAATAAAAAGCTTAATTTTGTCTTCCCAAACATTATGTTCACCAGGGTCTGCATTTTAAGAGACAGGAAACTGTTAGCTAAAAAAGAAATTAACTTAATCCCCCTTCATTAAGTTCCAGTCTTTTTCTGTTACTTAGAGACAAGTAATAATTATACCCGTAGCAATGCAAAGCATGTTTTACACTTTTGTTATACAAAAGAACTGCGGTTGTTAAGGTGACAGCAAAAGAAAATGAGAACATTGATAAATACTGATTTTTTTTTCTTAAATCTTCTCTGACTCTTGAAAATAAATTTCACTCAGGTGTCTGAGAGGCCTTTTAATTCATTAACTGCAAAAATCTACACATATGATTTTAGAAAATGTCAATCAACTAGCTAAACAATATTTTCCCAGCTAAGGTTATAAACAGCAGCTAAGTGGGTGGAAAATGTCTAAAACGACTATACATACCAGTTCTTTTATAATGCATAAAAAGTGGGCATTTTGTTTTCAAGCTGGTATCTTTGGGATGGAACTTTTAGCAAGCACACAGTACATCTCAGCAGTGTATATTATTTAAAGTGCATTCTCTCTCTCTCTCTCTGGCATTGTGAAGACTTTTTAAATTTTAGCTTTACAAAGGGGGGAAATCATTAAAATGTGGTTTGTACCATTACATTCCATTATTTGTCATCTTTATGGCTATTCTATAGTTTTCATTGACCTTTAATGGTAAGCTTGGTCAGGAGAGGTGAGCAGGAATGTTCACATACTTGGCTGAGGGTGCTGCTTGAGAGTGTCTGTTAGCTGGGCTTCAATCCACGTCCCTGTAGATTTTAATGTCCCTACAGACTGCTGGCAGCCTGCTTCCAGCTGTGGCAGGCATGATGCAGTGAATTGCTTTTGAATGTTCTTTACTCAAATAGGCAGTAATTACAAGCTTAAAGAGGTTTAGTGGTCCAGTAAACTACATAATCACCCCTGAATTAGCCTGGGCTCATCAGTTGCAGTCCAGCAAGCTCCAGTCTGCTGTTTGTATGCCGTCTTGATCACATAGCAACCTGATCAGCAGGTGTGGAGCAGCCAGAGTCCCCCATAAACACAACTGTCTACTGGGGACAATGATCTCTAATGAGATGAGGCTACATCATCACTGTAATTTAAGTGGGAAAATTAGCACTAGAGAATGGGTACCAGTTCCAGGGGTCTTTAGTCATATTGGGAGCAGCACGAATTCTCCATCTCATTCTCCCTGTCTCTATCTTTTTCTCTCTCAAAAATATCTCCTCACCAAATGTACCATTTTGCTTCTAACTTACGGATACTTTATTCTTTAGACAAGGATTTTTCCTGAATAATTAATGCTAGACAGGGCATCTGTAAAGGCAATAATGATTGCTGTCAACAGACTCATTCCAAAATGGCGTTGTAGTATTTCATCTTCCTTGTCTTTCTACTTAATGGTTTCAAAATCCTTTCTCTTTGATTTTTAAAGTGGAAAAGTGTTCTTCAGGCTGGTGTTAGGTCTCCTTTTAGCTGACGTGCTCTCTGAAATTGTAGAGATGGGCTATACATAGTTTGAAAAAGATCCTTACTTTATTGGAGTTTATTGTATAAATCAGTCATGAACTTTCTTTTCAGAAAGGTGGTCCAGTATAGTGTGCC

SEQ ID NO: 128 - protein, 1285 aa, Homo sapiens
CACCTCAAGTCTGCTCTGTCTGCGTGGGTCTTCTTTAAAAGTAAAGAAACAATCACTTTCCTTTATTGAAGTGTGAAGCTTATTGAAGACAAAGTTTGTTTTTTGAAATAGTGGCTGTCTTTTGATTCATTAAAAGTGGTTGATAAGTTAAACCCCTTCCCATTTCAGTCCCAAAGATTTTTTTAAACTTTCGTAAGCATTAAATGTGAGTGGTTTTCTGAAGGAAATGTGACCTGTATAACCAGTTCTCTTTCCCTGATTTTTTAAGGTCCATTAGAAGTGAGTAATTCTGTGCATCTGTAACTTTATGCCAGTATTTTTAAGAATTTCAATTCATTTTTTCCCCTGCCGGCAGTGAATTTTAAAAGTCTTAAACATGCCCAAACATCTCAGGGGGGTTAAAGAAAATTATAATAGTAACTAGTTTCTCCCCCCTCCCTAAAAAAAAATAGAGCACACTACTGAAATTATTTAAATTGACTGAGGCTTTTAAGCAAGTAAACACATTTTAACTAGGTTTTTTCGCAATCCCTCCATTCATGCCAACTATAGAAATTAGCCTTCACTCTTCCTTCACTTACACATGGATACACACACTTGCATGGACACAAGAAAAATTTCTTTTCTCCTGTCAGCATTCCTCCCCAACAATGGTTAGATTAGTGGCATGAAGGCAGCCGCAGAGAAAGGACATTCAGGCCAGAAGGCTCCCCACAGGCACAGCTGGTAGGGGTTAATGGCGGCTGAACCTCCCAGCCAGGGCCTTTTCTCTATTGTGTGTTCCACTCCTGGGAAGGAGGGACACTTGTGACAGCCTCTGGGGTGCAGCGGATCAGAGGTAGAGCAACTGGGTCACAGAGGACTGTTCCAGGGGAAGGCGAGTTTAGGAAAAACGCACTCTGAAATCCAAATGGTGGTGTTTCTAACTGTGCACAACTGCTGTGGGAAAATGCAAAGCGTTTAGCAATATGGCTTATAAGTTTCTAATTCACATCTTCATATAGGAGCCTTACAGGAACAATTGGGCAGGGACTTTGAATCATTCCTATTGGAAAGTGATTGAAATCTGAGTGAAAACTACACGTTTGGCTAATGTATGTTATTAAAGTTTGTGTGCTAATGTCTAGGCGGTCTATTTTCCACATGGCATAAAGACTAGAGTGCAGACACAATGGTCAGAGGGGGAGAAGCTGGGGGCATCTTGATAAATAGGAGGTTGAAATTTAAGTAGAAATTGATTATTATGCATACATGTCCAGATAAAGTAGGTGTGCTTTAACACGCA

SEQ ID NO: 129 - protein, 2282 aa, Homo sapiens
AACCACACAGCTGGTTTCCAAGCAGATAGTGAAAGGACACAAATATACCATCTAAAAGGTACTGTCTGGAATCCTAGAATTTGAAGACAATAAGACCCAACAACTCTAACTGGGTTAAGAACACTTTCCAAAGTCCTCTAGACAGTTTTGAAACTAGATCTATTTCAATTCAATGAACATGAGCTCTTTGGGGAATGATTTCTCATAAGGGAAGAACATGATCTTTTTAGGAGCTGGATATGGCATTGAGTGGTTTCCAAAAAGCAGTCAACATACAAGGACTGGGTGCAGGGACAATATTCAGATGGTGGTCCAGGAGCTGGGAGGGGTGTTGGGTTTCAGAAGAGAAGGCAGAGTGGCATGAAGGCTGGAGGAGGGAAGATGGCAGCAGATTGGGGAGAGCATGGCAGGCAGCACAGGTGGATGGAGAGGGCATCTTGATCTCCTAGGAGGGAATATTTGGGTGTCCATAGCAACTGCCCAATTAAGGGAGTCTAGAAAACAGGTTCTGATGCCTGGGGCCCAGGAATGAGGAAAATAAAGACAAAGTGCTGCTTTTTAAAAGTTAACATGTGTTTTCACCATGTACAGCTGGGTTCTGCCTCCAATGGCGCCCTTTCCTCTTGCTTTATTTTTACTCTCAGGAAACCGTATTCTCCTCTTTCTACTTCTCACTGCATATGACTCTATTTTTTTTCTCTTTATGGGAGGGAGAACGAACACACACACACACACACACACACACACACACACACACACAGGCACACACACACACACTTGCCAGATCACTTACCCAAACCTTACCCTGGGGAGCCAGCCATCTCATTTCTGTAAAAGGCACAAACCTCAGACCATTGTCCTTATACAAGATACACATTCAACATGCTGGGTGCCCTCGACAGCTACAGATGGTTTGGGATCCACCAGCCAGGAGGTAAGAAGTCTGCGTCAGGTCCCCCATTGAAGTGTTCAGATGGGTCTAGGGCCTGAGCACAGAGAGTTAAATCATAAATTAGCCATGAGTTAATACGTGAGGCCCGGATCACTCTGCCTTGCCGTCAATGCTTCTCGTCCACAAGGCTCCCTCCCCCTTCCTCCCCACACCCCCCACCCTTTTGAGGTGACAGAATAAGAAATTAAACACTTGTGGGTTCATTCGAAAGAGTGAATGAAATTGAATAAGCTCTCAGTACTTGAGGCGCACAGCGAGCGCCTGAATGGGGCAAACCTCCTAAGTTGAATGGAGTGTCTTTTGGGACCAATTTGTCTCTTTTCACTCTTTATTCTTCCCTTTTTGCTGACAGATGTACAAAGGCGGAACTGCGCCGTGCAGCTTATCCGCATGCACCCACAGCAGCTGTCACTTTTGTCGAGCAAGTTAATCAAGCAAATGCCACCATATCCCACTTTCTATAAGGAACAACATGTTATAGACAGTAGTCTTGCTAGAAAGAGACTTTATTTTAACTTTGATTGGCTTCGTTCCCCCACCCCTCCTGACGCTTCCCCCTTTTCCCCCCAAAGGAGGGGGAAGGGGGGACTTTGCCCAAGCCAAGGATTTGGCTATGACAATGTCAGATTTCATAATAATATTGTGTGTGAGGCTGGAGACGCATTTGGAGTTCTTTCCTAGGGATGGAGGGATGCCCCGGGTCTGGGTTTTTTTGGAGTGTGCTATTGTTTGTGCTGGACTGTTAGGCTGCATGTCTCAAGTTATAAAAAGAAAAGCCGAGGGCAGAAAATAGTATTACGCCACGAATGTCTTGGATTAATTTTATTCTTTTTTCCTTTGTAAAGCAGGTTGTGTTATTTACATATTTCTTTTGATAAGCCTCCTTGCCTGGCTAAGCTTACAAAGACTGTGCTAAATACATAATAGCATTTCTTTGTGCATCTTGTCGTTAGCGAGTTCTTTAAGTTGAATGCCCAAATTTATTTCTAATGTGCACCAACAAATGCAAGCAGGCCTCCATTTCTCTAATTCTGTGTAAGCCAAGTGGGGAGCCTTTACAAGAATTCCCTCACGTCCACATCCACTTACCCTTCTGCCTCAGTTACCACTATTTGATGGTGTTCAGAAACCACAGGCAAGAGTGAGCTTCATTAAACGGTACGCAGTGCTGACCTCAGCCACTGCCCCTGAGCCCCCAACCTGAATGCCAAAACCAGACATATTTTGAATAAACAAACTCTTTAGAAACAATGCATATAGGCCACTTTCCAATGGCCAAGGGATTTGCCACTTTCAAGAGTTGGCTAACAGCTGACGATCTATCGGGAAA

SEQ ID NO: 130 - protein, 2638 aa, Homo sapiens
CAGCAACCATTGTTTAGGAGAGTAATAATCAAGAGGTGTCATTTGCATACATTGTTGTTATAGCTATCATTGCATTTTGTGGCTGAATGACTTAGCTGATCTATGTTAAATGAGGCCTTCTTCAATTCCTTTTACATTTTGTTTCTAGCACTTAGTAGGTGCAACGTTTCTTTTTATCCTCTTAGAGAAAGAAAATTATGAAACAAAATATGTGACTTGACTGGAAAGAATACAGAGCAGAAATTTGGAGAGAGGTCAAAATAAAAGATTGTGACTTTATCACATAATCTTGGGAAGGCCTACTGTCTATCATTTGGTGGTGTTTTATGGTCTTAAACCCTCTGGACCAAGTTCCGCACAGCTGCACGAATTTCATATGTGATAGAACATTTTTTCCATTCAGTGTGAAATGTTCCTTCCTAAAAAACGTACACCAGACTCGCTTAATTTAGTCTGTTAAAAGAAATGCACATGAAAAAGGACAAAAGGCTCTTTAATCTCTGCAAGCTGTTTGTTTTTCTTCAAGATTCCTGTCTATTTGGGTTTGAAAAGTCATGTTTATTGAGGAGATGATTCTGAGGTGTGACATTAAAATAATATATGATTTTTGGACTGGTGGCCACGCTTCTGCTTAATTTGCAGAACTACTTTTTATGCCTGTCAAAACACAGCGTTAATCTATCCTTATTTACAATTAATCTCAATAAAATTAATCTTAACTATGCTTTATTCAGTGGCTTAAAATATCTAATTATATTCAATTAACTGCTGTCATAGTAATTAATATTGCTTAATTGACTCTGCATATATTTATGTAAAGCTCATTAGGTGCTGCTGACTCCTTTTCCCTTTCCTACTTGCTATTTTTGCTGTTGTCAAACCATGTTCATCTCCCAAGGTTCGACAATGTCAATGAGAACAAATTCTTTCTTAACATTTTCTTGAAATGAATGTTCCTGCCTTCCTTTGAGAAGATACTCGTTATGAGTCTTTAAAGACTAATCCATCTCCCTCTCTTCATTTTCCTTATCCCTGGTCTCTAGCACTCTCACAAAATATGTTCTGTCATTGTTGCTAGAAATATGAGAAGCCAGGTTAAGCTTTGTGTTTATAAATGAGGAGCCTTTCTGTGACTGCCTAAGGGCTGTACCCACAGGGAGAGGGTTTCCCCCCCTTCTAAGACCACTCTAAGGGTTAAAGACTTGGCCAAGGTTCAAACTGAGAAGCGCCCAGGGAAAGTGCATGTGAATATGTACAAGTTTCATGTAATTAGTGCTTAATTATATTAACATATGCAAATTGTCAACTTAGGAGCTTGTTGAGCTGGCAAAGATCAGCTAGGCACAATTGCAGTATTGTTCTGAAACAATAATGGATTTCAAGTTGGATTGTGGAAACACATAACTAGCTATCTAATTTAACTCATACCGTGGTGAAATTTCATTAGTCTCCATGGAGACTGGTTTAATTGTGCTGACTAATGTTCTGGGCTGCAGAATGTCCTAAAAAGAAAGCGTTGTTTGCCTAATCCACCTTACAATGACACTTGTTTGTACATGTTTCCCTTGTGTGAGAATTTGCATATGCAAATAAATAGTTTCTCTGCCCCATTTGTCATGGCTGTTCATTACCCATGAAGAGGACATTGTTACTAGGCTGTTACTGAGTCTCCCAAGACGGGATAGTGTCAACCAGTCCAGCTACATTCTTTCATAATTTGTTTCTGATTAATAGACCAGAGTGAGTCTCATTCTTTTTGGGCATCTGTAAAAGGAAGGTCACTTCTGTCACAGAAAAGAGTTTCTGCAGTAACTGAAGGACTTTTTCTTCTTCTTATTCTCCCTTTTCCACCCATTGGTTAACATAATCATATTTAAAATAATGGATTCTTGTTCTAAGAATGCCTCTACTAATAATCTCTGGTTTCCTAAAGCAAAAAGATAGGAAAAGAAAAGAGATTCTGTTATTGGAATATTAATCCTGTTTTTGACAGAAAGGTAAACTGATATAATTGCTTTTCAGTTGAAGGAATGGGGGTTTATACAAGTGTGAAAGCATCGGAAAAGGATTAGCATTTTTTTGCATAATGAAAAGCTCTGTTGAATAGGGTCCTGAATGGCTGACTGAATGACTAAGATGAAAGGAAGATGAAAATGCAGGCTTCTCTTTCTTTATGTCTATGCTCCGCTCTCTCTAAAGTTATGTTTGTCCAAGACTTGAGAAAACAAGCAGGGGCTCAGATTTCAGCAACTTTATAAGATGCTGTGTTTTCATCATCATTGGGACGTAATGTGTATGACAATAGTGCAGCTAGAAGATGATCAACAGAGGTTTGTATATAGAAGAGTTTCAGAAACATGCCAGGCTAGCCAAATATTGACTATTGGGTATCAGGAATTCCCAGCACTTTGCTGGCAAAAACAATTATTTTAGAAGAGCCAATAGTATGGTGTGGATATTTAATTCAGTTAATGATGGAATATAAGGTGCCTGTTTTTTTCCCCATAGGCTATAAATAACTATCTCGATTGGTGAAACACTTCACTTGGGAAAGAGTTGTGTAATCTGACTTTTGGCAATGTTAAGTGTTTTAAGTGGTCTATCAGCTTTTGTGGCTGGGAAGGGAGAGAAGAGGGTA

SEQ ID NO: 131 - protein, 2039 aa, Homo sapiens
AAATTCTGTTATGCAATTCTCACATAAGAATTATTAGATGTATTGCAAATGTCATACAATAAACTGAATATAAACAAAACATAAAATTATGATGTTTATCTTTATTTTCAGATTACTGATGCTTCTAAAATGTATTAATAACATTAAAATTAAAAGTTAAATATCCTGATAGTTAATATAAGTGCAATTTTGTAAAATTCCACTTTTGTGCAACACACAGCTAACTTTTAATATTCATTTCTCATTTTCTTATTTTTCTATATTAATATCATTGCTAAAGTACAACACAAATGCTCAAATTTGTTTTTAAAATTAGCTGATGAGCTATATTTTACAGTAAATAATGTGTGATTAAATTTTAAGTTATATAAGAATCCACTCACTAATATCAAAATGTGTTTATGGCCTGGATACTATAATTTACTTTACTTCTTGTTAATTCGAATAATAAAATACTCGAAACATGGTCTTGAAAGTTTTAGGTAGATACTAATGTAAAACTACCTAACCGTCAGGAATAAAAACCTGCCATCGATGCTATTTCCATTATTTAAAATATTGAATTAAACCCAGCACATACTGTAAATTGTTTTTGCTTCTTCCTTTTAGGATAGTTGTGAAAAGTGAAATAACCAGGCAGCCTTATCTTAGGTGAGACCGTTTCGGCTTGGAAACAAACAAAGCTCTCTCTCGATGAACTGGGTTCATTTCATATTTGTGTAATACCCTGGAAGAAATTAGGTTTCAATAAAGTCCATTTTTGTCACTGCATGTAGCAATGAATATCACACCCAGCAGGGCACAGTGGCACCTGGCTGTCCAGACCCCAGTGTAGCACAAACCATCTGGGGGTAATTACAACAAGGTATTCTTTAAGGACCAGATGGGAGCAAGGAACAGAAGCCCCTACCCCTCCCAGTCATTTACAACATAATTCCTTTCAATGATATACTTAATCCTCCCACCAGCTATGCCTTTCAGCTTGCTGTTGTCACTGTTCCTTTATGTAAATTCAGACGCAAGACCGGGAAAAAGAGGGGGTGAGACAGAAAGTACAAGAAAAAAAGGGAAAGGGTGAGAGAGAGCGCCACTGGTGCCTCTAGGGACCAAAAGAAATTATTCATCCCTAAATTGTTTTCACCACAGCGAGTACAGTAACAAATTTTTTTAAAAAAAAGAGGACTGAAATTATCCTAAAGAAGGTCAATGCGACAGCCCTGTGTGGCACCAGCTGAGGTTTACTCAGCCACCTGTTAGCTAGAAAGCTCTCTGCACACGCTTATGATGCATTTAACCAGTTTAAAGGGTCTTTATTGACAGGCCAGCCACCTCCATTCAGCAGGCTGGAGCCATAGGCCTGCTTTGTGGTCATATGTGGCACACAAGCCTTAATTCAATTACGCTGTAAGCCTATCCAATCTGCATCACTGCCCTTTCACTTTTGTGCCATTTGTCTTGCATATTGTAAAGAATTTTATTTTGAAGAGGGAAAGGCACCCTACAACCCAGTTGTCTTTATTTTTCATGTAAGGTTGTGCCGCAGGTGCGCCGCCACCTTTCAACTCCCGAAATGCATTCATCTTTAAGCGATATTTTAGAGGGAAGCAGTATTTATTGTTTGGTGACACTGCTTTGTGGGTGTTGCTGATTTTTATTTTTTTTTTAATTAGGTATATGTTCAAACTCTCCAACACACCAGCAAAGAGTCTCCAAACTTGATTGTTAAAAATTCAAAAGAAGAAACAAAAAGAAAAACACACATGATAAATGAAAATGACAATTATTAGCTTTGTTCTACAATTTTTTTATTTAGAAAGAAAAGTATTTCTTAGAGTGATCATATATTAAATTTTAAATTTTGGATTTTCCTCAAGTGTCTGACACAAAATATGAATGTCTGTATATATGAGTGAGGCTCAGTGCTGCTATGTTGCTTGAAAATTTCTAATATAAGTTCCATAGAAGGTAATTAAATATATCAAGTCTGCTTATATTGTTTTGTATTTTGGTACTTTCAATTTTCCATAACATTGGACCAA

SEQ ID NO: 132 - protein, 3022 aa, Homo sapiens
GCTTTCACACAGGAAGCTGTGAGATGGCGGCACCCAGCTAGACATTCTGCTTAGGTGAATTATGGATTTGCCACACTGAGAGTTCTCTTGAGACTCAGGTTCAGAGGACATGTGTGTACACATGGGGGGCAGATATATGAGGGGAGGGCTGCCGTGGGGTGGGGGCTCTAACAGTACCGTTTTCCCTGCTCCCAGCCTCATTATCGCTCTCCAAGGACCTCAATCTCACCCAGGCCAGCCCTGCCCCCTTTCTGCACCCAGTAAACATTGCTGGCCTGCTTTCTCATGAATATGGATTTCCATCATCCCTCACTGTAGGGATAGATGTTGGGGGCAGAGCTGTTGATTACATTTCCAGCCAATCATTGCCCATTAGCAGGGAAGAGCGGTGGGCATTATCCCTCTTCAGCGAGGAGCCATTTGCATTTGGTTGGGCCCCGCTTTCTTTCTGAGCATCTACGGACCCTCAGCGCACTCAATTACTCCGGCATCCGGCCCTTCCTCTTTCGCTTTCTAAGTGTCTTGATTGGATTGGCCAAATAGCTTGGTGCTAACTACAGCTGTTTAGCATATCCCTGGGTGGAGGGTGATAAGGACCGCAGGGTTTGAGTTGGCTGTAACCTGCAGAAACAAATACCTTTCCCTTTCTGCCCATACTGCCTTCCACCCTCCTACTAAAAGAATCCGCAGTGGTTTGCAGGGAATAGCCCCAGCAGGCAGTAGGGTACGCGCTCCATGCACTTTGCATCTTTTGGGGAGGTCCCTCCTTCTAGAGTTCTCTTTCTAGTGCCCTTGCCCCCGGAGATGTTGGTTTCCCAACTGCCCTGGGGGGCCTGAGGGGTCTGGCACGGATAGATGGTAAGTTTCCCCACCACTTCCGCTTCTGGGAAAGAGGAAGGAAGTGGATCTAAGCAGAGTCCGCTGGGAAAGCAGGTCCCCTCCCTATTGGAAGTTCCGGCAGCGCTCCTGGGCCTTATGGGAAAATTAGAGGCCTGACCTGGGAGACAGGCATGTTTGTGTCCTGCTCACAAACCTTGGTCATAAGTAACCTGTGAGGACAACTGAGAATGACAGAGGGTTTCTTTCGTTCACAGGATCATGTTATCTTCAACCCCCTTCTGCTGCCCATGTTCCCCTGGAAAGCCCTTCTCCAGAGTCAGAAACATTTGTTTGCTCTTGTTAAGGCTGGAGCCATTTCCCCTCCCTCTTCAGGGTTTCTCCCACCCCTCAGCTCCCTCTTCTTCAGTGTTACTAGGGATGCTGTTTTGTTTTCTTTTCCTCTTCTGTTTTGCCCATTCAAGAAAATGAAAGTGAGCACCTGAGAAAGAGAGAGCGGGAGGCAGAGGGGGAAGAGAGACTGTGAGCACCAAATGATCTGAGTGTGATAGAGGAAGGTTACCTGTGTGTTTGTCAACAAGATGAAATAAATAAGAGAAAAAAAAAGAAAAAAGAAAAAAAAGACAGCAGTCAAAGGCAATCAAATATGTATTTAATTAAAGCAAACATAAAAATAAAAGTTACATGTTGAATCAATAAACAGCACTTTTTTCTACATGCATTTTGAACAAGACAGATCAGAATCTTGCATGATGAAGACATAATGTGTCATAATAATTAGGAACACAGACAAAAGAACAGCTAATCAGCATGCAAATGTATGCAGTTCTGGTGATTCAGATGAGGCAGATTTCTACCTCTTTTTTGCTTGATTCATCTTCATTGCTAATCATCTGAAGGCTGCCAAATGTTCACTGACACTAATGTATTATAGGTCAAGAGAGGCAGGTCTTCACCTATTACCCCCCCAAACAATATGCTTCCCTTCCCTGTTTCCTCTTCAGGATTTTCAGCAATCACTGCCAGATGCAATCAGACTCCTTGAATAGGAGCAACTGAGGCTTGTTTGTGGCTCGGATTCATTAGAATCAGGAGGCTGAAGAAAGGAATAAATTACTTAATTGCACAAAAAAGTTGCAGCCAAAGTGATGGTGAGAGAAACTGATTGTGTAGATACGCATTAGGCCACTCTTGGAATGGGGTGTCTTAGAATAGCTGGTAGTTTGGCCTCACAGATTCAGACAGATTTGGGTGTCCTCCAAAACAGATGGCTCCACATACCATCTATTCTTCTCTTTGTCAGGTTTTACCATTTATTTGATCTTGGTCCCTCTCTGATGCTGGTTGTATTAGTTGTAACACAAATATGCATTCAGATCATATCCATTTAGTCTGGCCTCTCCCAACTTTTGTTCTTCCTCTTTTTTCTTTTTCTTTTTTTTTTTTTTTAATTTTCTTTTTGAGAAGATGGTCAAGTTGAATTAAACCCTTGTTGTCCAACTCTTGAATGCTCCTTCACATGAAATGCAGGAAATGGGAAGATTGCACAAGCCTGCAGTGCGGGGGTGTGAGCCCTAGACTGGAGGGAGGAGGAGGGAGAAGCTGCTCAAATGGGGAAAGAAAGAAAAGAAAAGAAAGAAAGAAAGAAAGAAAGAAAGAAGCTCTATTTTCCAACCACAGGGATACCTTCCTTGCCTCAAACTAACTCTTAATCCGTTAAAAAAAAGCACAATATTATCCAGTGTTGTTCATACACAACCAAGGAAGAAGAAACAAAACCATGCAGAGCAGTCTCACAAATGCTTCCTTCTCTTTTCTCTGGCACTTTGGCATGTGCCTCCAGCCATGGGGCCTCTGACTCACACATTCCACTCAGGTTTTTGGTCATGTGCCTGACTTGCGGGTGGTCTTAAGGTCTTGAAGACAGAACTTCATTTTCTCTGTGAAGTTCCTGCATTGCTACTAGTTGTGTGTGCGTGCGTGTGTGTGTGCATGTGTATGTGTGTGTTTTGGGGATGGGGTTGGGAAGAGGGAGGAGAAGGTTCAGTATGAGACAAGAGGCACTGACAGGGAAGAAATTGGGAAATAAATTATGATTGATTTCTATTTGGGAAGAAAAAGTATTCAGAGAGGTAACTTTTCTAATACTGTTGAAAAGTAATTGGCAAAGTGGATTCACCCAGGT

SEQ ID NO: 133 - protein, 2379 aa, Homo sapiens
AGGCAAGAAAACAGGCAAGTAATAAATAACATACTCAAGTTTATCCTGAGCCCAAACAACCCTCAGGGCTGAGGCTCTGCAGACCGCCTTCCCTGCCAGACCCACTGCCACTCATCTGCGGCAAGGGGATGCCTTTCCTGCCTGAACACCCAGGCCTTCAGCCCTGGGTAAAAATATCTGTATTGGTATTTTGTAGCTTTTTCTCCTGCACGCTGATAAAAACAAACCCCGTTTGTTTAAAAATCAACTTCCCCACTCCCTCCGCCCTATTTCCACTCTACTCTCATCCTTTTCCAATTTTTTTTTGAAACCCCTTAAAGGAAATGTCACCCAAACATAAGGAATTGGTCATTAGTATGTCTAATGGTGGACATTTTTTATGTAACGCTCTGAATCTATAGTGAACAAAAGCAACTGTTGAGAACTCTGCAAAAAAACTGCCCAGCAATTTTAAGTTAATGGGCAAGATTAATGGATTGTCATATAATGTGAAGGGAAAGTATTAGAAAGAAATGAAAGTGGCTAGACAAAATTGGTTTGGAATTGGAGTCTACCTGAAGGCCCCTCAGCAAGAACATTACTGTCTGCTGTATTTTCAGCTAAGCAGTGTATTAATTTGAAAGCCATGCCTCGTACGGATACCCAGCACTTAGTGGTTGGTTTTATGTTTAAAATGCTTAGTATGAAACCTGTGCTGAAAATTTGCCCAAACATCTCACAGTTGATTGCAAACCCGAGTGCCTGGGGGCTCTGAGTCCACACCTCAAGAATGCTGGAGTGGGGGGACTTTCTGGCTCCACACCTGGGTTTGTCAAGGCCTCTTCGGGCTGCTGGGAATGTGCCCTGCCTGGGGCCCGCTGCTCTCCTCATCAGCCCTCTGACAGATTAAAACACAACAGGGTCTGTTGCCTGACTGACACATTCCTCTCCTGTCTGCCTCTGAAAGGACTTTATTTAACAGTCCTGGAGTCGGGCTTTGACTGACAGATTGTGAAGGGTAAAAGTCATTCAGTTCCATTAAGCTCTGTAACTGCCCTGGAACAAAACACCTTCCAAAAAAAGTGTCGGAGGGAGGGGAAAATAGAGCTGTGGAGAGTGGGGGCATGAGCTTTCGGGAGAAAAAAAGGGGGTTTCTTTTCAGGTTCAAAAACAATCCTCCTCTTTGCCTTCTGTCTATCAATTAGGGCGGCATTCCCAGAGGGAATACAGGCCCGGCCTCATTGGTGTCATTCAGCTGCCAATCTCCTGACAGAGACACCAAAGGGCCTCATGTAGCGCTGCGGAAACTGTCTGTCAGGCCATCAGCAGCTGCTATGACGACATCGCCTCTGTTTTTCTAGGACTCTTATGGAGGGGGGAGTTCACCCCAACAGAGTCTCAGAGTCTCGACTCCAAACCTCTGTTCATATTTTCCTTTTACAACCCATCCCCAGTGTGAATTTCTTCACAAAAACAACCCCCGGCTCCCTTGCCTGGCTCGGCTACGAGGTAAATAATAGCTTGCCAGCCAAGGACATGGTCTTGGGTGTGAGAAAGGGGTTCTGCTTCTGGGAAAAACCGAGTCGTGACTGAACACATTCAACGACTCTGGCTCAGATGAGTCCAAAGAAACCCGATTTGCAGTGAAAGGTCTCCATCCACCGAAAGGCCTGCACAGGCCGCGTGTGAAGAGCAGTGTGGCCCCACAGACGGCCTCCTGCTCAGCCTTAACCTTGTTTGGGTTGCTGTGGGTTTCATTCCCCTGGAGTTTTGCTTGGAGCCTGAAGGCTCAAGCACAGCTCAACACTTTAAGCCAAACTCAGCACCAAGCAACCACTTCCCACTGCTCTGTTTTTCTGCCTTGCTCCCCGCTTTCCCCAAGGCCTGACTTACACGGCTGCCTTGAGTTTGCCCCAAAGATTCCTCAGCCTCAGCTGATCACACAGAAGACCCAAGAGTACAAAGGAAGGGCCCGTTTACCCGAGCTTTCTGGCTGGACTGGGGAAAATATCTTTACCCCCTCCCTGCCCTCAACTCCCTCCTGTCCACTCCAGATTCTGCCTAAGACTTGGGGAGGCAGATCCGGGCCACCAATGGCCACCTGCAAAGATAGTGGTTGTCTCTGCATTCTGTAAAGGCTGTGTTTGTGATTCCTGGCATTTCCCTGGAAGTGTTTTCACATTACAGGGAGCTGCTTCCAAATGGTAATGATAGCACTTTGTACCAAACTGAGAGCTGGAGCAAGTTGCTGCCAAGCCCCCATGGTCGGGCCATCGTGTTGCAACGCTTCTGCTTCTATTACAGTTCTTCACATGTTCCACCCGAACCGTACAAAATGTTTAGCCAAACCCTGTAAGAACATGTACATAAAGCTGTCTCCATGCTGCCAAGGTGGTAAAG

SEQ ID NO: 134 - protein, 993 aa, Homo sapiens
CTCTCTGGGAACTCTGCTTTGACTTGTGAAAACACATATTCTTCCGTGATAATGAGAAATTTCTGTAAAAAACTCACTGAAAAAGTATTGGAAGGTATTTAATATGCTATCACAGAACATTTTTAAAAATTAAGGTTTGAACAGGAAAATAAACCTATGGGATTAAAGGCGTTTTTACAAACCTAAAGTTTTTTGTTTTTTTATTTAATACAAAATAATTCTTAAAGTTTGGACCTTTTCTCATTAGGCATTTTATTGTTACAGAAAGGGGATTTTTAAAAGGTGTCATTTTTAGTCACAGTTATTCTGAAAAGTTGTTTTTGAATAATTTCTCATTCTAAGGGATCTGAAATAGCCATTTTTAAATTTTCAAGACCATTCCACATTTGGTTTTATGTTTAATGAATTTAGTCATAATACTCCCAAACCCCATAGGGTACAGTTTCTATGGTTACCAGACCCTTTGTAGAGTGACAAAGGTTGGAATTCTGATTCTCGTGAGTCAAATTTTGGCCTTTGACTGGGTCCCCTCTGCACATCCTTGCTAAGCTTGGGCTGTTGCTATGCTTGAAGGCTTGTCAGCTAGCAGGTTCCTATGGTAACAGGAATGGAAATTTGAAAGAAGAAAGAGAATGGTAGCACAAAGGCTTGGTTGATTTGAATTTGAACAAAGAATGGAAGGTTCCCTGTAGTGCACCTTTGTTGTAGAAACCAGAAATTTAATTTTAGAAAGTTACTTTCCAGTTGTAAACTTCCTATACCCTGGTCTTGATTTAGTGAACAAAAGTATTATGGTTTAGGGAAGTACTCAATAAGAATCTTTATAATTCAGTTAGCTAAAGTTCCTTTTCTAGACTTCATAGAGCTTTCATAGTATTTCTTATGTTATACATTTGTTCTCAGATTTTTAGTGTTCAGGCTACCTCATTTAATTTTGATTTTGCTGAGGTCAAAAATTGTTAAGGATAAAAAAAAAATCAGGGCAATTTGCTT

SEQ ID NO: 135 - protein, 2479 aa, Homo sapiens
CCTTTCTTGAATGTCTTTCCTGGAATTTTATTCTAAATGACTTTTTTTTACAATGAATATTGCCAAAAAGAAGAAGAGAACAGAATGCTCTGAGTGGGTCAAAGAATGCTGGAGAAAAGTAAAAGACACGAAATTCAGCATTGGTTCAGCCTTTCTTGGTTTGGTAAATTTTAAGAGTGATTTCTGGATGCTTGCCCAGGATTTCAGGAATGCCAATAAACAATCTGTAAAATAATAAGCACTACATTTCATTCTGGCAGAAAACTTTTTAAAAATCTATACTAAAGTCCGAACAAGCTCAAGGTCACTTCTGGGCTTAGGCCTCATATAGAATTTTTCCATAGACTTGGGAAAGAGAACAGAGTTTAAATACAACATGCAAAAGAAGGCTTCATTTGCTCACTCCCAAGTATCTCTTTGCACTTAAGAGTGCTTATCTGCAAAGCACAATGTTTCATTTCAATGGAATATTTGACACAGAGGCTCAATAGGGCTCCCACTCATATTTTACTTTAATTATTAGGCCCAAAATGTACAATCATTTTCTTTATTTATAAATAGCCTTTTTAAAGGAAATCAAAGTCTGACAAAGTTTGGATTTCCATGCATTTTTTGCATTAATGATGACATCAAACATGCACTCATTATGCTCTGTTAACCCTTCAGTCACCAATCCTAGCACTAGTGGCTGTGCATAACTAGTTTTTCCTGATGATCTAACTCACACTAAGGCCGAGAATCTAAAAAGAGTCCCCTTTTGGTTTAAGCTCTTGGGGCCACATTGTGTTTCTGTCACAGGAGTGATGGTAAGAGGGACTAATTAAAAGTCCAGTGAATGTGCCAGGGTTAAAATCACAGGCTCTGCTCATTAACAGTCGTTTACCTAAAGATATTTCCAAAGAATTCCTTCAATGTCTGAAAAGAACAGAACCTGAAGGGGGGGGAGGGAGGAATAAGTTGAGAGAGCCATTTAGAAATATTTTATATTAGAAGCAGAGTTTTGTTTTAATTCATGGATGCTGTCAATAGAAGAATTCAATTTAGTGAGCAGTTCAAATATCGTTTTTTTCCCATCGGTGCAGGCATGTATGTGTGCATGTATGAGTGTGTGTTTTAAAGGGGGTGGGGGATAGTCTCCCTAAGTCTAACGAGTAGAAAAAGAAATAGGAAAAAAACATCAGAACCATTTTGTTAATTGTCTTTTTCCTGCTGTTTCCATGGTAATACTGGCAGCCAGACTTCTCTGCAGAGTGACAGTCCAACAATTCACACACTACACCCTTTCAAGCACAATGAATGGCCGTGAAAGAGGCCGAACAGGCACCATTCAGGAAACATGTGATATCTACTCAATGCACTACCTTTCATCCACATTTTCCAAATTGCAGTTAATTTAATTCTAAACAAATGGCTAAGGGGTACAAATGAGGATTAGAAGGAAAAGAACATCTTGAGCTCTAATGGGGATGGTTTGTGTGAAGAACAATATAGCACTTTCTTCTGTTGCCAAGAAGGCTGGATGTGAAGATGTACTTCCCTCCTCATCTGAAGCCTTTGCTTGGACTCTATGTCAACAGTAAGAACCATGGCAGAAAATTTCTTGGCAAAACAGAGTTCGTGTAGGTTTTGGCTTCGCATTTGGAAACATATTAGATACAGTGTGATATTACTGCGTTTTACTATGAAATAAAATATAACATCAGAATTTTTACTGACATGTCGGAGCTACCACTTTCTATAAAGTTACATTTTTCTTATTCTTTTTTTTTTTTCTTTTTGAGATGGAGTCTCACTCTGTCGCCCAGGCTGGAGTGCAGTGGCGCAATCTCAGCTCACTGCAACCTCTGCCTGTCGGGTTCAAGCAGTTCTCCTGCCTCAGCCTCCTGAGTACCTGGGACTACAGGCGTGCGCCACCACACCCAGCTAATATTTTGTATTTTTAGTAGAGATGGGTTTTCACCATGCTGGTCAGGCTGGTCTTGAACTCCTGACCTCATGATCCCCCTGCCTCGGCCTCCCAAAGTGTTGGGATTACAGGCGTGAGCCACTGCGCCTGGTCACATTTTTCTTATTTAACATCCTTCAACTTTTGGTGAAGAAAAGCAGTAAAGTTCCCTGTAACAATTCACAGGACAAGACATTATCTTTATGCAGTCTAAAGTTACAATATGATTTGTATGTTTAAGTGTCAGTAAAGTAGGGCATAGTTACTTGAAAAACAAAAACACAACAGGAAAAGGTGGCATAAGGCCCTGCAAACTATTTCATGTTATTTGGTTGGAAGAATCAAGATGACCAGCTGCCATATTCTTATGAATTTTTAGATAAATGACTCAGAAAATTCAGGAAAATCCATTTGAGGATACAGCATATGTAAAGCAACATTTCTATTTCTATTTTTTGAATTAAGGTAGTGTTTTTTATTCCAGTGGTAGGCTTTACGTGTTACAATATTATGAGCAATTTGTTTAGAGATGCG

SEQ ID NO: 136 - protein, 2049 aa, Homo sapiens
CTCTGCTTTGCTCTTGTCCCAATTCTGATTTCTTATTGACATCTCCCATTCATTCTGTAAAATTTCTCCAACTCCTGCAAGATCTCTTTCTTTGTTTTCTTTTGCCAGGTTTTGTTTAACATCGTAACTGTCTTTTGCCTTTTCCTCTTTTCTCTCCCTTCTCAAATCAGAGCTTTCCTCTTATAGCCATTCAAAGTAATATGTGGTTTATTTATTAATACTTCCCCAAGGGGTTTCTCCTGCCTCACGGCATCCCCGATTTCTTTGCTGAAGTTTTCTCTCTCTAATCCTGGCCTCCATTGTAGCCCCAAATGGAAATAGCATCCTTATGGAAATATCTCTTTTCAAAAACTCATAGCTCCAGCACACTGAATAAAGCAACCATTATCTTCTAAAGCATGAGGTTCATTGAATTCACCTCAGCAACTTGAAACCTTTTAAAGTTTTATACATTTTGGGAAGGTGTCAAACCTATTCAACACCTTCCCGTGAATGAAAAAATATATCCATATATTCAGGACATGTCCTCCCTTCTCTGTTATAGACAGCTTTTAATTTTATTCACATCTGTTATTATTATAAACAAAAGTTGCTGTTTTTACTTGACTGCCAAATGAGGCACAAAAAACAACAGCTGTTGCTATTGCACAACTGAATAAAGAGGAGAGGAAAAAAAGAAAAAAAAAAACCCTAATTAGTCTTGCTTTAAAAAGCCTCAGACATAAAACTGAAAGCCTCCCATAAAAGAAAAAAAAAGAAGATACAATAAGTAGACTTGAACATGGTCTGCTTATAAATATTCATTGGGAAAAATGGGATCACATCATTATGCCAGTCCTCCGGGAACCCTCGCTGCTAATGAACTCTTGCAGCACATGTTAGTAATAATGGGCTTCCTTATTCTACAAGACAAAAACAGGATGCTGTGCCAACCTGGTGGCTCAAGTAACTAGCCTCAGCAGGCCGCCGTGGAGTTTCCAGCTTCACTTGAATTCTGCCACTTGTAGCTGGATTGATAGTTTTCATTGTGCTCTTGCTGGGGGAGGGGATGGTGGGGGGAGGTCAACGTTCTTTATGTCACTGGTGTCTCATTAGCCTTTCATCATTGTGGACCACATTTGGGCCAGGGGCATCCATTCCTCCAAGCAGAGGCCTTTCCCTGCCCCACCCACCCCCTCCACGCCTTGTCAAAGCTTGTTGGTGCCCCTGCCAAGGCCCCGGCCTCAGGGGCCACCTTTCTGTTTCTAGGCTTCCTTCCAACCACTCCTCCAGTTCACACTTTCCCTTCTCGGGGGCCAGCAGGAGGTCTTTGGAAGATAACTCAGCTCTATCTACCATGGAAATCTTGTTAAAAACTTACTTCCCCTCCCCTACATTGCCTGGGGAAATTTTGGAAAAAAAAAAAAAAAAGAGATAGAGAGGAGGAGCTTGTATTCCCTGCTCTGTCTTTCCTGGCTACTGCATATTCTCTTTTTCCAGATGTAAATGTTTCTTGTGGAAGAAGGGTTTTATGATTGGATTCCTTGTCAATCCTGCCTCTCCTCCCCCATCCTGCAACTCCCCCAGAGGCAAAGGAGTGCCATTTGTGAGAAGGGCTATGAGGGCTGAAGTGGGGACTGGGTCATCAGGACACTGTCATCTCTCCATCTCTAATACGTACTGAGATTTTATAGTGACAACACTAATCTCATTTAATGCTAACATCACCCCTCTGAGGTGGGTGGTATTTCTAGACCCTGCTTATGGAAGAGCCTGCAGCATGACCAGAGTCTTACGGCTAATTGCATATTACACAGGTGCTCTGACTTTACAGCTTGTACCTGATTTATTCCCCCATCTAATTTAGTGATATCATCACTGCCACTTTCATTTTCTGAAGACGAGAGATGGAAGTTTCCACCGAGATGTGGATGTAGGGAATCGTAGTCACATTTGTTTGGAGTCTTGGCTTTAAGGTGGCTCTGCTGCATTGGGATAAAGCACCTTAATCCTCTTGGGGCCGTCATTCCCTGGGCCTGAGCTGACCTCATTTGGCTTCATCTGCAACTG

SEQ ID NO: 137 - protein, 1405 aa, Homo sapiens
TCCCAAAAAGCATGGATGTTCCTAAACAGCCCCCTGAGCCCTGCCTTCATGAATGTCAGCGTGGGGGGCTCCGGCAGGCCCACGTGGGCATGTGCCGGTGAGTGTGAAGCCTCTGTCTGCCTGTCTGGGTCCCCTGTAATTCATCAGATGCATGTTTGTAACAAAAGGATCATGCCACACGCCAGGGATCTTTGAAACTGAAAGTTTGGTTCTTAAATGAGCCCAACTGCAAACCAAATGGTGTGTGGAGTGCTGAACGGGTGGGGACAAAAATCGTGGTGGAGGAGGTGGCTTTTCTAGCAGGGCAGCATTTCACAGCACGTGCTGCCAACTGTTGCAAAAAGAAAAAAAAAATCCTAAGAAGAAGAAAGAGAGAGGGAAATGTACATATTCCTGCAGCCCTGCAAGTGCCCTTTCTTCTTCATTGTTCTCTGGAGCAGGCAGCAGGCCCGGCCAACAGCTGTGCATTGCGTGTATCACTAACAGCTGCTTTTTCCTGGGGTGAAATTAAAAGATTAGGGGATATGGGCACGTGCTGGCCTCAGGAGCCCAAACAATGCTTGATTTAGGGTGAAACTTGTCTGGGGAGACTGACAAAGGAGGAGGCTCCGAGTTGGCCAGGGGTCAAAGAGGGGAGCTGGCTTTGACAGAGACAAAAGGAGGGAGGGGGTGGGAGGCAGAGGGCTAGGGGAGCCAGGCCAAGTGAAAAGAGGCCTCGCAGCAGCTGCTCCTGCCCCAGAAATTTGAGACGGGTCTTTTCACAAACACAAATGCCTGAGAAGAATAGGGGGCCACGCTTAGCTGAAATGGCTCGTTTGCAAATGAAAAGGAGATTGGGAGCCCTTACATTTTCCAAGTTTTCACCTAAGAGGATGGAAAATGATTAGTGTAGGCAAGAAGTGTGCAGAGGAGCAGATGGGCCAGCCACCCTGGAGCTGCACTCTGTGTTTACATAACAATCATGCCCACTGCCGGGGTGCAGAAGCCCAGGCCCCCTAAATGTCCAGCAAGGACACTGGCACCCCGGAATTCGATCAGTGCAGTTCCAGCTGGGACTCCACAGGACGTCTTTGCTACAGCGTGTGTGGATATTAATTTATGTGCTGGATAAATTAAATACACTTATAACCATGAAGCGGCAAGGTGATTGCAGCAGGAGGCAGGCTGGCAGACAGCACGCCGGTGTGGTTGTTGTCCCTTGGCAGGATGCCTGACTTCCCAGACTTGCTGTTTCTTCTTGGCCCCTGCTGAGAACATTGGAGGAGAACCCCTGGCCTGCACTTCACCGTGTGTGACGAAAAGGGTTTTAACCATGAGCAAACACAGGGTTGGAAGCCAGTCCCCCAAATCAGGCAGCACAGAAGGAGGATAGCAATAGCCATCTTAGTAGGAAAAGCACCTGCCA

SEQ ID NO: 138 - protein, 3424 aa, Homo sapiens
CCTAAACATGCTTGGACATGTTTCTACAAACCCATCCTTGTCTTTTTATATAAAATATTCCTTTTGCACTAAGCTAAAATTAAAGCAAGCTGTATGTGACATTTATTGGTGACTTATACAGTAGACCCTTAACATTCAGGACCAAGCATTCTGTTTTTAACTATTTCTTCATACCGTGAAAGTCTGTGGAGAGAAGCAATTTGAATTTCCTGAGGCTTCAATTTGTGTTTGAATAGCTTGTACTCTTAGGCTCAAATGGAGGATCAAGTCATTTATTTGATGAGGGAGCTTAGCCAGCATCTCGGCATTTGTATCTCAGTGTAATATAGAGTAAATCTCTTACAATTTTTTAGTTGTAAATTACCAGATCTTTGTTTCTGTATGGAAGATTGTCACCGAAAGGAAAGCTAATTATTAATGGCATGACCTTTGTGAATTTGGAGATTTATAGACAATAAGGATCTACTGTGTTAATATTTGAACAGTTGTCAAATAACGGTTATTTTGATTTTTGGTCATTTTCTAACATGTAAAAAGTGTGATTCACACCAGCATGAGTCATTTTGTGAATGTTCAAAAAACACGATTTATGTTTGAAGTGTATCGTGTTCAGTTTAGATGACTGAACTGCTTTATAGTTGCAGCCCAGACATCACTAATCTAACAGATTTCAGACGACTGTCAGATTAGGTGTGTTGTATTATTAGAGACACAGTATGTTTTCAGGCCAATTTCAGAACCAGTGGAGGAGTTTGGTCATTCTTAGCCCCTTCTGACAGGATAAGTGTTGTCACAGAGACCATGGTGAAGGCTGACACAGAATCATGGGACTTCATGGTCTGGTCCTAACCTGTTTCTCTGATTTTACATTTCATTCCTCTCCAAGGATGCACTTATTTCAGCAGTATCTTTGTTGAATAATTTCCCCTATCCCTAACCCAAACTAGCACTATCAAAAGCTTCATAATTACCTGTCACCTGGAATCGCCTTTAATCACCATTAATTCATTGTTGCTCACTAATGTAGAGGTTAGGAAATGGGAGGTAAATGGCCAAAGTACGTATTCCATATATAGTACATCTATATGGATGTATAGAGGGGGCATGAATAGGTATTAAGGGAATGAGGAAGAAAGCTAGGCAAATTTGTCCTTTCTTTTGAGCTACGTGTTACTTCTGTATAATAAACAAATCTTATATTGCGGTTTAATTAGTTCAGAGACACACATAGGCATACACTCATGCATGAGGAGAATTATAATTTGTGCATATAAAAAGGGAAATATCAACACTGTTGATATTTTTAATGGTGACTTTCCTATTTCTGCCGTGTAGAAAAGGTACTAAATATCACCCCCATTCTAAAAGTAGTTTTGGTGAAATCTGAAAGGGTCTGCTCCTTTTTTAGTTGATCCAGACTCCATTGATAACACTAAATTTTCATGCTGTTCTGCAGTTATAGACCCTTAAACTTAGACTCTCTTTGTACTTCATCATTGTAATTTACACACTAGGTTGGTACATTCTCTTCAAGACAGTTTGCCTTGTGCTTCCAGCTGCTCCCCAATAGCCATTGTGCTGAATAAGCACTTATTTCAGTATGTCCTTGATACAATTAATGCAGGCATCTGCAGAAGCGGCCGTGGCAGCAGCAGCTGCAGTGCCTTATGGAAGCCAACTTCTGCTTAGCATTGTGATAAAAGAAATAGTTTTGAGCTGGAAGCTAATGTTGGCTTATTTTTAGCATAAAAAGAGTTGCACCTGCCAGGGCTAGCGGAGGACCGAGGTTTGTTGATTACACGTTCTTGTTAGTGCCATTGTTATTGGTAAAATGGGCATGATGTCATCCTTATCAAACTGAATTGGCACCCTGCAGAGTGACAAATAATTTACCCTCTGCGGTTTTATCAGCATGGGCCGTGTGTTAGAAGTGACTAGAGTGCTGAGTTTTCACAGTTGAATGCTATGGAACTGCAGAGGTGTATGAAAATGAAAGGGATTGATACTTGTAATCAGTGCACATAGTAATGGCCAAGGTGTAATGAAACATAAGTGCACATTTAGGGTAATTATGCTGCTACCAGGTGGGGCCCTGGGGCTTTGCATGTATAGAAGCTGCTTGAGGTGGCGGATGTGCAGCGAGGAATACTGCAGCACCATCTGGTAGATTCTCATTTTCTCATTAATTCTTCTGTCCCCTAAGTCTGGGCTACATTGACTTTGAACAGCACTTCATCTGTTCAGTATCTCATCTCATTTTAGTTGGGAGTTGCTCTCAACAGTGGTATTGATATGATGTAATTCACAATCTCGGCCATGTGAGATATATTAAAACAAATCATCTAATTGATTTTCTTTTTAAGTAAAGCTAACTGTCCCTAGTAACATTCACATGACCATCTGATTCTAAACCATTTACCACTCTTGTAGTTATTTAAATTAAAATAGAGTATTTGTTTGATTTAAATTAGCCAAATGAACTTTGTTCTTCAGAATAATTTATAAATAAAAGTATAATTTAAAGAGTAAATAGTAAACCACATTGCATTTTCCTTGGTCATTTTTTAACGTGTGTGTTTTATTTCTACAGGCCGATGTAGTTTTTGTCTCAAATATAACAAAAACTTGTTTATTAGTGAAGCTTCAGAATAAGAAAGTACAGTGATGGTTGCCCAGCAGTATAAACATACTAAACTCCACTGAATGCACAGTTAAGAATGGGTAAAATGGCTAAAAACAAAAAAATAGTATTTGAGGTTATATATTGTGTAAGGAAGTAAAATTCTTAAAACTTGCCAAATTAATTTTATACGAATGCTTTCACATAACATTAAAAATAAGATTTCTAGCATAATATTAGTAGGTCATATATGGTTGATTTCCTTATCAATATGAATATTAATATCATGAAACATTTTTAAAGATCCATAGTATATATTCATATAACACAAATAGTCACAATGAAGTAGCATCTGATGGCTGATTTTTTAATGCTGTATAATTTATAACGGGGTGCAGTGTATCAAAATAAGACGATCTAGCATCTGTGATTGTAGGTAACTGACATTAGTGATTTCACGATTTCTTTAATAAGTACAAATATAACATTTATATGGTCTGAGTGCTTGAACACCTTTCTATAAATAATAGAAATGTCCCCATTAAAATGTTCCACTTAGAGAATCCCCGTGCATTTTGTCATTTTATTTCCATGAATGTTCCAAAAATGGAAAACGAGAGAAAAACCTATTCGCTTCTTCCAAACACTACATGAATGCTCCCTGTGATGCCCTTGAGGTCAGTGTTTGTCAGTGTAGTGCCACAAAGATGTGGAGAGCTGTTCTGTCAGTGACGCTGCTGCCATCTGAATTTCCCATCACTCATTTCCAACCTATTGTCCAGATACTGCAGGCTTCATGAGAGG

SEQ ID NO: 139 - protein, 2386 aa, Homo sapiens
GGGCTCAGTTGTGATCATTGAAGACATGGATTGGTAGCAGTTCAGGAAGGGATAGAAGGAGTGGTCTCTGCATTGTGGGTGAATGGCGTAGGCATAGGCAGGCTGCCAGCCTCCCAGGAAGGCTGCCTTCCCAGGAAAAAGCCTTCAGTCCCAGTTTTCCTTATACTCAACAGGGCTGAGGACAGGGAGAACTAGACCCACCTTCTTAGCTGCTTTTTATTCACTCATCTACCACTTCTTGCTTAAGCAGCCCAGGCATCCTTATGGGGCTTAGAATCCACTGTGTTCTGGGGCCCAAGCTCTTTCCAGCATCTCAGGAGTTGTGATCTTTGTGATGAGATCCTCTCTGAGGTTGATCTCCTGTAGTCTCTTGCTCATCTAGCCCCTATGGGGAAAACTTGAACCATTTCTTCTTTTGGAGACTTGCTCAGAGGGGAGGCCTCACTTCCACTCAGCAGTCATATGAGCCAATAAAAGCAGATAGACTGGAGTTGAGAGTGCAGCTGTTATAAACTACAGGAGGGTAGCCATGTTTTCAGAATCCCCAGAGGCCTATTTTAAAACGGTTACATTATAAATCAGCAAAATCTTAGCAAAATCCAGAGTTTCCTAGCCTTTTAAACAAGAGAAATAATCAGTCTAGCCTTGTTCTTTGCCTTAATGCACCTTGGCAATAAGAGCTTAAATGCCAAACAATGTTTTTTCTTTCACATGTGTGAGACCGAGGAACACTTATTGTAAAAGTTAAACAGAGTGACAGCTTGCTTTGGCTGATGTGTAAGAGTTCTTGACTGGGCTGCTTTCCTTTCTTCCATAATAAGTAGTTAATAGAAATTCACTGACCTGCAGTGCAGACTTAATTTATCGCGTATATCAAGTTGATTTAACAGGAATGGAATGTGGTGGAACAATAGCTTCCCTCTCTCCCCACCTCTTGGTGATCCTCCGACATTCGTTTGGAAAGAAAATCAGATTTAAAAACATGTAGAACCTTTGTGATTTTGAATAATTGGACTATGTTTGAAAAAAGTATTTAATCAATGACAATCATCTGTTTATTTGAAAAATGGTTGGGTTCAGGGAGGTGGTATTTATCTTTAAAATTTTCACTTGTAGGAAAGACTGAAGTGGCTGAGTACGCTATGTGCTTTGCACTGTATAAAGGGAAAACTGAAAATCCTGAATTGCTTCATTCTTTCATGGCATGTTCTTTATTTAGAAAATCCTTAATTAATTTTGTGTGAAAGCAGACGGTCAAAGGATTTAAAGAAGCAGAAAAACATCTTGAATTTCTTACTGCTTGCAAAGTGGGGAAAGTGAAAATGGTAAACTGATTAAAAGAAGTCATCTTGAAGCCTACCATTATAATGAGTTGTAAATAACAACAGTGACAAATCTGAATCATTTAAGAAAGTTTGCGCAGGATTTTTCCATTTGAAATGCATTTTTTTTCCAATTTTGGTCTCTTGAGACATCAGCCATTTAAAAGCATGATATTGGAACTAACCCAGCATCACTTTTAATTAGCACAGAAATGCTAATTATACTTTTTCTATGTGACGCTTAATGCGAGCTGTCAGGACACTGCATTTTTTACATCAGTTGTGGTGAGATACACAAGATCACCAGACCCACTTTAAAACGATAAAGACCAATACATCTAAACTGATGAGTATTTTTAAACTATAGGGAAGTGCTACAAGATGCATAAAAATAATGGCATCAAAGTGAAAAATTTGGGCTTTTTATTCACACCAAGTACAAGCATAATTTCACAAATTTTTCAATATTTGTGGTCTGTGAAACCAAATTTCTTACCATTGAATCATTGAAAATACACATAAAGCTTGATTTTGGAAGAAAACTACTTTTTCACTAAAGAATCTTTTCGAAAATCAAATAGCCACCCTCTCTTCATTTTTTAGGGCTTCGCATTTCAGATTTTCTTTTAGGGCTTTGCATTGCATTTTAGCTTTTAGCTTTTCGTAAAGGAAAGTCTACTTGTGTTCTTGGCTTTTTTTTTTTTTTTTAACAGCTCTAGGGCCGGGCACAGTAGCTCACACCTCAATCCTAGCATTTTGGGAGGCCGAGGCCGATGGATCACTTGAGGTCAAGAGTTGGAGACCAGCAGCCTGGCCAACATGACGAAACCCTGTCTGTACTAAAAATACAAAAATTAGCTGGGCGTGATGGCTCATGCTTGTAATCCCAGCTACTCGGGTGGCTGAAGCAGGAGAATCACTTGAAACCAGGAAGTGGAGGCTATGTTTAGCCAAGACGGTGCCACTGCGCTCCAGCCTGGGTGACAGAGCGAGACTCCACCTCAAAAAAAAAAAAAAAAAAAAAAAAAAAGAAGATGACAGCTCTAGGAATGCAATGGTTGCTG

SEQ ID NO: 140 - protein, 3113 aa, Homo sapiens
GACCTGGCATCAACCAAAGGTTCCCATTTTCTTCATCCAAATGGATAATTTTGCCCAAAGAGATCACTTTGTCATATGTGCTTTCATGTGGTGAGCTGGCAGAATTGCTGCTGCCTTATATGATCAAACAACAACAATAAAAATCACAGGGGATGCAGTGTATAGGCAAAGTACAATTAGAGCCATCAATTATTCTCAGGGATAAAACTTATTATTTAGAGAATAAACATTACGAAATTACTGATTATCTGTTCCTTTAAAAAAATTACCCAGAATGAAGAGTAATAAAATGTAATACAAATATAAAATGTAACACAAATATCCAAACTGGATCATAACTACACAAGATAAAAATCCTGAGCCAAGAAGCTGTACCCAATTCTCATACTTTAAGAATCTTAATAGAACTGATAGTCCCCATTAAATTTTGTCCCATTATCATTAGTACACAGTTAAGACTTTATATACAATGGATAGCTTTACCTTCAAGGCTATTTATAGCAAGCTAATAACTGAGACCCCAAAGACCTCAATTTACATAAAAAGAAGGCAAGGCTACATTCACCCAGGTATACAAATCACAACTATATAGACAAAAGCTCTAAGAACTCATAATCTCTTCTTTTTGGATTTTGTCAGGGATGGCTGGCTAATTGGGGAAACTCATGAAAGTACCTTACAATCCAATTAGCACTTCAGTGCAATTAAGTGGTAGAGGCTTCCCTATTCTGCAGAGACTGGCTTTGATCTTGCAGTGAAAAGTGTCCTTCCTTAAAGCTGAGGTTTTGATTTTTTTCTCAGTAATTAGTGCTAATTGTAAACCCAAGCCTGACCTGCTATAAACAGAGTGTTTTACCGCATTTGACACCAGGACCCTAAATCAGTGTTCTCTTTTGTCTATATTGTACTTGCTTATTAGAAATCTGGCTATTTTGCTCAACATTTGATGCACAATGGGTAAGTACATACTAAAGTCAGCTGAAACAAATGCCTTGATCTTAAGAGCTTGTGTGGGTATTTTCATTGATGTCTTTTAAGCCCAGTTACCATAAAAGTAGTTGATTGAATTTCACTTAAGGAATATACTGTAGTTTTTCTACACAAAGAATGACTATTCAAAAGCAGTTTCTAAAGAGGTTTAACAACGCTTGTATGTTTGGAAAATAAAAACAAAAGATGAAAATGGTCTTTTCATGGGATCAAATATAAAGAACTGCAGAAATCAATTGCAGAATTCTCCTGAAAAATACCTATTATAACAATGCCTGTTAAATCAATTCATTGTTTCGATTTATAAAAATGAATTAAAATAGAGGTCAATGAGTGAGTAGGCTGGTGAGATATCTCTATATGGAAATAAGATGCTGTAAAATAGAAAATCCCAGACCTTCTCCAAGGTATAGATAAGATCCTTTGAAACTAGCACACAGTTTCCATGCAAATGCAAAGCAGCTGGATGTTAGATAGAATGTTTCTCCCTCAAATATGTTTTTAAACATACCCTGTTCCATTATTTAGCAAATGCTTCCTTCATAGGAAAAATTATACATGGAGGTATAGCCAGTTGAGGTTATAATGTTAGACACTCTGAATTAGGACCAATTTAGTGATCTTGAAATAGACATAGTCTAGTGTACAGATACATAATTACTGGAGGGAAAAATATGTTCCCAATACAAATATGAATTACACATAAAATATGATGACACCAATTAGCACTTCTTACAAATAGCTATTTTGGTGATATTTTTCCCCTTAGGGAAAAAAAATCAAGAGTCTAGTGACAGTTTTTTTTCTATAAAAGACGATATGATTGAATCTGACTAAAACAAACAAAAGGTAGAATGGGCTCTTAGAAATTTTCCCTGATTTTACACCTTGTAAATTTATTTTAATCATTTTAAAACCAGAGTATTACAGGCATAAAAATTAAACAATAATAAAAAGCCTGTTGAAAACTTTGGGGTATTTGCCCTATCCCTTCCCCTCCTCCTCTCCAGACACTACTTTCAACTCTTGCAAGCCATTGCGTTGGCTCTTCATCTCCATATTTTTAAATCAGAAATGGCTCAAAGGGATAAGCCCTGACTATCTGTATTTTGGAGTTACTCAGGGGAAGGGGCTGGGATATTACATTTAGTACCAGACTCTCACCCCTGTTTTCAGACTGATCTCACCCTCTTGAGACCCTGCAGTCTCCAAGCCCTGAGGCTCTCTAATTCAATCTTCCAAGAGCATCATTTCCTGCCAGGATGGAAGTGGTGAGGTCATTTGTCCAGTGACAGAGAATGTTTCGAGGAAGGAGAGATCAGGAGATCCAGTTGTAACTTACACATACTTTTCAAGCAATCCCTGTTTCCACTACCCACACCTTCACTACCTGGCTCCCAATTTCTCAGACCTTTCTGGGAGGTAAACTGGGTAGCTGCTCTTTGGTACTTTCAACCTGGAAGCATTTTTGTTCGACCTCACTTCTCTCACTAAATCCTTATCATTCCTTTACAAAATTTGTGTGGTAAAATGTATATAACAAAATTGGCCATGTTAACTGTTTTTAAGTGCACAATTCAGTGGCATCAATTACACTTACCTTATTGTACAACTATCACCACATCTAGTTCCCAAATTCCCCATCATTATGAACATTTTTTTATTCTTCCATCTGCTTTCCTGTTTTGCAGGTTGTGTTTTAGGAGTACGGTGATCTACTTTAATAATAATTGAAATGTGTGTTTCTTTTTTCCTTGTTTTGGGTAATTTTTCAAGAGAAGAATGCAGAAGTATCTTTATTCTGTCATCATAAAACCAAAGTACCATCTTCTCTTTTAAAGATGGGACAACTCTTGCCTGGAATGATTAAGTAACTTGATCTGGCTATCAATGTGAATCAGTGGCATGACAAGATTAAAACCCAATTTGCTTAATTATCTACCCAAGGTACCTTCCATCAACTACACTATTCATATCATTATTGGAGTCCTTGTGAGTTAGGATTTCAATTTTTTTTTCTTTTTTTGTACATCGTTTTAAATTGTGTATACCAAGGAGATTGAGAATGATGTTTCTGTAAATATTATTATAACACTAACTGTTGGACAGTTGCTCAGTAGGAA

SEQ ID NO: 141 - protein, 3100 aa, Homo sapiens
GCAGTTCCTGGAGCACAGTGGACACTGGGTGGGAGACAGGTGATTTAACTGGCCTTCCTTGGGCACCAGTGAACAGATGTTGTTGCTAGTCAGTTATGGCCCCTTCTCACGGAGTCCGGGTTCAGGTTCTGCCCCTCATTTCTCAGACAGCGTCCCAGGCCACCTCCACCCATGCCGGACTTTATGCCTTCCTTGACCGGGAGGGCCACTTATCCTTGTTCAGGTCCAAAGCTGCGAGTTTTGGTTTTGTTGTTGTTGTTGTTATTGTTGTGTTTAGAGACTTGGTCTGGCTCTGTCACCCAGGCTGGAGTGCAGTGGTGTGATTACAGCTCAATGCGGCCTCGAACTTCTAGGATCAAAAGAGATCCTCCCACCTCAGCCTCCCGAGTAGCTGGGACTACAGTAGTGTGCCACCATGCCTGGTAATTTTTTAAATTTTTTGTAGAGATAGGGTCTCACTCTTTTGTCCAGTCTGGTCTTGAACTCCTGGCCTCAAGCTATCTTCCCACTTCGGCCTCCCAAAGTGCTGGGATTATAGGCATGAGCCACCGCACCTGGCCTAAAACTGCATTGTGCATATAGCCGTGGAAGTGCTGAATTGTATTGTTATCGGGTACTTTAATAGTGATACATTCAACCGGCTGTGTGGCCTTGGGAGAGTCATTTCAACATGATGAAGGTCCAAGCCCAGGAGATGATCAGAGAATCATCCCGAGTCTCCTGCAGCCCTGGAGCATCTTCTGGTAGCAAATAATCTAAACAGGTATCTTAATAGGTGAGCGGCACGTCTCGAAGAAAAAAATCTCTCCACACAAATGGTAAAGGTCTTGAAGGAGCACCAGATCTGTAGCGTGTGCAGCACCACACTTTTCATATATGATGTGATTAGTGTAAATAAGTAGTTGATTTTGCTTCATAAGTCAAATGATGATTCTTTTACAAATAGCCGTTTGAATAATTCTTTACACCTGCTACTTAGCCATAGTTTTGCTGGAAGGATTGAGTTTTCTTCTGAAGACACAGCACTACTCTGAAGCTTATTTCCCCCTGAATTTTGTTTTTCCCATTTTTGGCTGAGAAGGCATCTGGAGTGACTCCAGCGGGTTTACCTAGGTTTTCCCTGAAGAGGTTTAGGTGATTAGACAATAACAGAAGGAAAAGTAGAGTTGCCAGTAGGTGGCTCACTATGAATGTGCTTGGGACGGGATCAGACATGTCACCCCTCCTCCACTTAGCCTTTGTTTTCAATCCCTGCTGCTTTGAGCCTTTTTCTATAATGTCTGAGTCATTTGCAGCGGGGTGGGTAAAGAGGGGAGAAAGAAGAAAGCAAGCAAGCAACAGCCTTTGAGCTCCGGAATAGCAAAGGCCCCCATCTTGCTCCGAGAGTTCACAGAGTATAGCCCAGTCCGAGTTCTCTTTTCCACGCACACTTGCTTGTTCTTTTGTTCCTTGTGTCCTTGGCAAAGACTGAAAGAACTAAGCCTGGAATACTTGGGCCCTCCCGTGTCACTTAAGAAATAATAAGCCATTGTCCTCATTAAGCCACCCTTGTTTTAGCAAATAGAATCCAGATACCGGAGAGGGAACATTTTGAAGGGAGGCAGAATTAGAGTAGAGATGCTTTACAAAATTCCCTAGAGAAACTGCTTTGTTTCTCCTATTTTATTGCTCCTTACTGAGAAGATTCATATTCAAATGGGTTGGGGTTGTGAATAGCGGCTTGCACATTCTCATGCACCCAGGAAGGCTATGATTATGGCTAATTACAATGAAGAATGAAGCTCTAACAAGAGTGTTCCATCAGATTGTCATTCATGCATGAAGTAACTTAGGCTGGCCAATGGAGGTGTGATTTTGGTAATTACAAACAATGTGGCTATTTGAAAAATGCTTAGTAAATCTGTTCAAGACAAAATAAGGTCTAATTAATCACTTTAGCTCTGAATTCTCCAGATGATCCATTTGCTCTGTTTTTTTTTTTTTAATTTAAGGTCTCTTTAATAAACTAGATCTAAGATATAAAATATGTTCTCGTTGCCCACACTTAAATGCAACTGTGTTACCTGTTTCAAAGGCTTCTTAATTCTGCCAATCATGTTGCAACCTGCTTTTAATGCAACTTGACAGAAGGCTTTTAAAAATAAATGTGTGTATATTCTTGTTGTTACCTGACAAGAAAATGGTTTATGAAAAGTTACTGTAAAACATTAACTATTAATTTAGAAGCCATATTGGTATCATCATTGTGCTGACATATATTAACTCTTGAATATTCGGTGAATGTTGTGTTTAGCACTTAAGTAATGTCTAACTATATGTATTAGTTTGTTTTCACACTGCTATAAAGAACTACCTGAGACTGCATAATTTCTAAACAAAAGAGTTTTAATTTACTCACAGTTCCACATGGCGGGGGAGGCCTCAGGAAACTTAACAATCACGGTGGAAGGCAAAGGGGAAGCAAGGCATATCTTACATGGCAGCAGGAGAGAGATAGAGAAGGCGGAAGTGCCACACTTTTAAACCATCAGATCTCATGAGAACTCACTCGCTATTATGAGAACAGCATGGGGGAGCTGCCCCCATGATCCAGTCATCTCCCACCAAGTCCCTCCTTTGACCCATGGGTATAACAATTCAAGATGAGATTTGGGTGGGGACACAGAGCCAAACCAATCACTATATTATAGGGGAGAAAAAGTAATATATTTTCCTTACCTATCACAAGGTTCGTGGCTGAGAACCTTAGAGCAAAGGACAGAGTAACAAGAGAAAAACATCACATTTATTTAATAGAGGTTATGTGACATGGGAGCCTTCAGAAATGGAGACCCAAAGAAACAGAGATGTGTGTACTTTTATGGACAGGCATGCAGAAGTAAGACTGGAGGATGAAATGGCATGCTCCAATCGGTACAAACTGGGGGCAACTCAGGGAGACCTGATTGCCCAGTTTCTTCTCCGTGTTCCTGAGTGACATTCCTTCCCTCCTGGTATAGGGCAGTACTCCTGTCACATGAGGTCTTCAGGGAAGAAGTGAGGCCGCAGGTCAAAGAGTGGCCTTCCCTGCGGTCATGGCCTGTTTCAGGGAAGAAGGGGT

SEQ ID NO: 142 - protein, 2755 aa, Homo sapiens
GGTGAGAAATGGGGACTGTTAATTCACTCAACAAGCACAGAAAAAATACAACCTCTCTCTGTCTCCTCGAAGAGCACCCACAGGCCCAAGACACACCTTGAACTAACCTAGAAGCTGGATGTCCTTGAGATGATTTACTTTTTCCAGGTTTGATAAAGAGAAATATCTTTAGCCCTGTCAAGCAAGCAGTAAAGCTCCTTGATTGTACCTTAAAGGGAATGAGAATGTTTCGGCTCATTTGCATTTTAAAGGGTACTCTTTCATGATCTTTCACACTTGTAATAGATGTCTAAACCGTTAAATTACTATTTCTTTTCTTAGCCTGAAAGTGGATGCAGACTAAGAGCGTGGCCTCTCCCATTGTTCTTTACCCTAAGTCGGCCCCTGAACAATACTGACAGCTGCTATCAAACCAGGCTGCATTTACTCTGCGCGCAGCTGCTGCTTGTAGGAACAGACAGTTTCCCGGTACCTCCTCCCCTCTGGGGAGACAGGTTGACACACTGCATGTTCAATGAAGGGGTGCAAAGGTCCACTGAATTGTCAACCCAATTTTATGCTACTTCAATTTTCCAGAACGCACACAATTCCTTTCAGGCAAAAATCAAGCATATGCCACAGCATGAAACTTAAGGTGTGGGATAATTATTGATCACCACAAACTTGAAAAGAGCCTTCGGACATAAATTCATATACTAATCCAAAAATTACAATGATAAAAACCGCACATGCCAGTATGCCCAAGACACACAATGGGCCTAAGTCTCGCTTGCATTGCGCCTGATTCACCACTTTGGTTTACTGTTGCCAAGGCATCCAGAGCTAACCTGCCTTTATAATAACCTCCACAACATTTTTCCTGGACTAAAGCCATTCGTAAAATTAGAAATTCATTTGCCCTTCTAAAAAGATCTGCTATTTTTATTCTCTGATTCAGCTCAAAATGGGTATTACCTATGAACATCTGGTTAATGCGATTTCCTCCTTCCTAAAGTGTAGGTGCAAAGGAGATTCACAAGAGCTGGGCGGTGCCTTTGAGAATTTAAACGTCAGAGTTTTGCCATCATGAAATTATATGTCGTAATGTAGAGTCTATCAGAAAACAAACATGTTCCACAAAGTTTAACCGGGTACTTGAGAACTGCTTTGCATATGTTTTCTTTTAATCAAAACAGGCTTTTCCATCCTCATTCATTTGGGTGAAAAAATTCTGTGCTTGAGCTACAAGTACAATTCACTATTAGTCTTTGCTAATCAAACACAGTACATGCAAAAGTACCAGTGAATATTTGATTTGATCTCTGAAATAAAGCAATTCATTACACAAGAAAAGGGTACAGAAGGCAGCAGACAAATGCAGATGTAATTGTGTTTTTTGTTGAATGTGATTAGAGAGCCCACTAAGTAACAGTCAAAAATGTGATACTGAAGGAGGGGGAAGGCAGTGCCTGGATCTGGGGGGAAGAGGAGGGAGAATTGTTTATGCAGAGCTAAGCTGTCAAGTGTAATAAAGCAGCTTGAATAAAATTTAAGCTGAAAATCCACTGAAGCTCCCCATTTCAGGGAGGAAAAAGCTATTAAAAGGAAATGAAGGTCACCCTCCTAGTTTATTTCACCTAATTGACTGCCAATAGCTTACCACAGACAACTCAACTGCAGATCTGCAATTGAGAAACTGATGAAAGGAGAGTTTTCAAGCTGAGGCTCATTCTTTAATCCTCCTTGGCTCTTATGTTTTTTCTCCATCTCCAGTTGGGATGTAATTTTAAGCCCTGATGGATTAACTGGTTCCATTGTCTGTGGCCGTCATTGGACTATGGCACTCTTAATCCGTACAGCAGCATGTCTAATTATCATTACAAAGTGTCTGAGGGAACTATAAAGACCAGCAGGGCATCATCTCACAAGCAATTAACATAAATTGATAAATGAGTGATTTGAATCTGCTCAAGGCACTCACATATGAATAAAATCAGAAAGGACGGTCCCTTGTTTCAGCTCCTTCTTTGGCTTAGTGTGGAAGGGGACGAACACATGAGAACCATCCCAGGTCCTGCAGTGGGGGGCGGAGGATGAACTCATGCAGGGGATGGAATGCACGGTTCACCAGATTCATTAATGCAGAGCAAATGACTTGTGATTGACAACCAGTGGCTAGCACGGAGCACTAACTGAACTCAAGAGAGGAGAGCAGAACCCCGGTGAAAAGCCAGGGAGCACTAGGGCAGACAATTAACAATTCTTCCATGGCAAGAGAGCGCTCTTTTCATTGGTGTGTGACTTAAAAATTCATGAAAGAGGCACAAGAAAGAACAAGAGCCAACAGTTCTATAGGTTCGAATACCCCAGAAAGCAAAAGGCAAAAAGCAAGGATAACTAAATGAAATGATAATTCAGAGACCCATTTTGACCTCACTGTGATCTAACATTGTAAGACAGAAGTGAGGAAAGTATTTAAAATTCTAACCTAAAGCTTTTACTAGACTAATGAAGCAAGGGTGGTTTAGGTGTCACAGGATGAACTACATTTATTTTCCCACTTAAAAGTAGATTTAGGGACGGGCAAGGGGGTGCCTGCCTTTGGACCCAGCTACTCAGGAGGCTAAGGCAGGAGGATCACTTGAGTTCCAGGCCAGAGTAGGCAAAATACCAAGACCCCGGTCTGTTTAAAAAGAATTTTTTTAATTAATAGATTTTTTGTCCCCTCCTAAAATGCTTCTCCTGTCATCTTCCTTATGCTAAGCCCTCTTCCTCC

SEQ ID NO: 143 - protein, 2862 aa, Homo sapiens
ATGAGTTTCTGAGTTGCCAAAAGTGTTGTAACTTATACTAGCTTTAAAAACTAAATGTAAATCAAAACCACAATGAGATACCATCTCACACCAGTTAGAATGGCGATCATTAAAAAGTCAGGAAACAACAGGTGCTGGAGACGATGTGGAGAAGAAATAGGAACTCTTTTACACTGTTGGTGGGACTATAAACTAGTTCAACCATTGTGGAAGACAGTGTGGCGATTCTTCAAGGATCTAGATACTATTTGACCCAGCAATCCCATTACTGGGTATATACCCAAAGGATTATAAATCATGCTACAATAAAGACACATGCACACGTATGTTTATTGTGGCACTATTCACAATAGCAAAGACTTGCAACCAACCCAAATGTCCATCAATGATAGACTGGATTAAGAAAATGTGGCAAATATACATCATGGAATACTATGCAGCCATAAAAAAGGATGAGTTCATGTCCTTTGTAGGGACATGGATGAAGATGGAAACCATCACTCTGAGCAAACTATCACAAGGACAGAAAACCAAACACCGCATGTTCTCACTCATAGGTGGGAATTGAACAATGAGAACATTTGGACACAGGGCTGGGAACATCACACACTGGGGCCTGTCGTGGGGTTGAGGGATGGGGCAAGGATAGCATTAGGAGAAATATCTAATGTAAATGACAAGTTAATGGGTACAGCAAACCAACATGGCACATGTATACATATGTAACAAACCTGCACGTTGTGCACATGTACCCTAGAACTTAAAGTATAAAAAAAAACTAGCTATACTTGTATACATTTCATATATATTATATATATTCACATATTTTAATCTCTATGAAAAGAACAAGTTCTATTTCCTTTAAAATTAAATTGAATACTACATATGTTACACAAAATTGCCTAGCTTTATTTTGCTTCAGTTGCTTTTCATCAGCATCTCCCATTGAGAGAGGATATATCAAGAAATACTAGTTAATAAAAAAGGGCCAAAAAGACTAAGATCCCACTAAAATACTCTAATAAAAATGATGGTTATTTTAATTATACTTCATTCACTTTGGTTTTGTGAATATGCAAAATATGCAAGAAATATTTTTAACAATAGATACATTTCTGGGCATACCATTCACTTCTAACTTTGTATGCAGATAAAACATTCCTCGACTTAATCTTCAACGTAGTCAACACTATACACACTGATATCTAAATCTTTAGTTTTCACTTTCTAATAAATATTCTAATATACAGAAACTGAAGAATGTTATTACCATTTTCACAAAGCATCTACATTTTTGTATATAGATGTAGACATTTTAAGTAAATATATTTAAGACTACGACAACACAAGTTGATGATACTAGGTGACAGTATTAATGCTTTTAAAATTATACTAAAGAAAAAACATACTAATATAAAGAAGAAAAAAACTGGTAAGTTTTTTTTGGAGGAGGTATGGTTTGCCATTTATTACTTTTTTTTTGTAAGAGTCGATTAATATTCTAAAAAGGTCTACGAAAAAGCTGAACAACCTCTCAAGCTCTGAATCCATGGCACTGACCTTAGGACTTTCTCAGAATGATTTTTAACGCACTCTGTTATTAGTAAAACCTGTTCAAACACATGCCCCATCTGCCAGCACCCCATCTGCAAGAGAGCTTCTTATTCTTGTAGACAGTACAACTTCTGCCTGTTTCCTTCTCTTCTCTACATACCAGCTGTATGGTAATGAGCATGAGCAGCTGAAAAATACTGCATTATAACAAAGCTAATATGAAAACAGCAGAATAGGACTTCCCTTCAATGAAGCAGTTGTAGCATGAACATAGCTGATAAGCTATTAAATAGAGGTAGGGGGTGGTTAGAATTTTACTTCTATGTGTGTGGGATGCCCGTGTGTGCGGATGCATGCATGTGTGTGTGTTAAATATGGAATTTCTGTATAACACAGAAATAACAAGAACCAAGAGAAGCACAGGGTACTAAAGAAAGGTCTAATTTTCTAAGTACTTTTGTTAAAATTTGTGAATCAGTTCTTTAAATGTTTTAAGTCTCAATTCTTATGTAGTAATGATATATCAGGTACCATTTTGACAAGACAGTTTTCAAATTTGTTAAAAAGTATGTTACATTTCTTAATTACCAAATTTTGGGGGCTTCAGTAGGAAAATGGTGTCAGAACTTAAAATTATAATGGAAACTATATACTAGACATTTTAGCAGCTAACATAATATGTAAATCAATAACATGTATTTTTAATTCTTATATAGCGATTTTAAAAATTCCAATTTAATGACATTTGAAACCAACACATTTATTCTGAACATCTGAGAATCTCCAAACAAACTACCAAGATGTCACATATGCTTTTCTTCATGTAGGGAGACATAATGGGGTTAATTTTTACATATATGATAGTCGCACTGAATGAATCTACATAATGTAAGTAGAACCAAATCACATTAACTTTTTATGCATGGTATCTTTCCACTCAGAGAAGATTAAAAGTCACTCAGGAAACTGTTTAAGAAAAATTATTCAAAATTTATGCTGTGCATCTTCTTTTACCACTTGAAGAAACTAAAAATGAAAAAAATACTCAAAATCTCTATCATAAGTACTATTACATCAGGAGAATTAATTATAAATTTTACCAACACATCTAAAAATGTCTTATGAGGGCTTCATAATAGTTACAGAACTCTTGTACATAACCATGCTTTCCATGGGTTATTTCATTTTATCCTTACAACAACCCTCTGTAAAAGGTACTACTATTAGCTCTTCACAGATAAGGCTTAGTAAGTGGTACAGCAAAGAACTTAAACCCAGGTCCAACTGACCCTATAATCCGCGCTCTTA

SEQ ID NO: 144 - protein, 3198 aa, Homo sapiens
GCTGCCTCAAACAAGAATGAAACCATTTTTCTCAAACTGGTAGAAAAACCTTATTTCAATTATTTTTTCTAGTCCTATACTTCCAGAGGATGGGAAACTGTTCTTAAAAGTGCAATGGACTGACAGAAAGCAGATCCGCGGTTGCCTCCAGGGCTGGGGGAGGGGATTGACTGCAAAGGGGCGCACGGGAATTTACTGGGGTGACAGAAAGATTCCACATCACAATTAAGGTGGTGGTTACATGATTGTATACATTTGCCAAAATTTACTACATTTACAATTAAAATGAGTGGATTGTATTATACATTGCTCAATAAAACTATTTTTAAATAGCTTTAGTAATAAGTGAACTAGTGCTTTTTTTTTGGTGATCATTTGCAAGAATACTCCAAATTCAATAAGAACCAGGATTCTCTTTTCAAAAGTCCAAAAACTAGTAACAAGTGCTGTGTTAGATTTGAAGAGCTGGAAGGACTTTACATACTTAAATTCCATTTTAATCTAGTTGAAACTCCCATAGAAAGAAGAAAAAAATACATTTTTAAAGTACAGATTTTTATTCAATAATTCTTTAGTTCTTTTCTCTTTTAACTTCCCTGGGGGGAGCAGGGAACTCTCATTCTGGTACCGATATTTGGATTAAAACAAATATCCACCCATTCATTAAAAGTTTCTCTCATATAAAGGAATTCATTTTTTTTCTTGATTGGTGCTAGACTCACAGACAGACAGAAATAAGCTGCCATTCTTCCATTTGATAGCCAGACGCTGCCAGTTGTAGCCAGGGTAGTCATGCTGTTAAATTAGGTCTAATGAAGGAGTAATTGCTTTAGATATAGTGAACCATTTCAAAGAAAACAAGGATTCTAATTGATTTGCAATTTGTTTGGCACATTGCATTGTCTGCGGCTATTGATTAGTCTTCTGGATTTCACACTGCATGTGTTTCCCTTTATTAAGGGAATAACAGGTTACTGATTACTTTCTTTCTGGGTTTAATGTAGCGGTTAATGTCTACTTTGTTCTTGTGTCATGTCACAGGCGAGGAAGGAATAATAGGCAAGTGGGTGGCCCTTTGCTAAGCAACTTCCCTGCTGCTCTGAGCTGTGTGCTCTGAGACAGGCTGAAAAGCAGATCAAGAGAAAGGGTTAGAATAGCAGGACTCACAAGTTAAGGCCTGAGTCAGGCTAGACCCAGCTCAAAACTTGGCTTTCCCCTCCCAGTCAAAGCATAGCATGGGACAAAGCAGCTGGTGGTAGATTTGTTCTTGTATCATTCGATTATTTGTAGACAGGATATGAATCTATGCCCATTGTTTTGCTTAATAGGTATGCATGCTAAATGGATGCAGAAAAAGAATATTTGAGGGTGAGGTCTTTTGGTTCATTTAACCCTTTGGAAAGTGACATTTTGTTGGCACCTGGGAAGCACTTGTTGCTGAGGTGTCGATATGATCATCAAAATGGCTCTTATGTTTATACCAACTGCAGGGGAGGGAGAAAAAGTTCTCAGGGTTGCAGTCATTTCATTGCCCTCAAAGCACAGCAGGAATTATTAGCTTACCCTGGCGTGCCCCTTTGTTTTCCTAGGGCTTTGCTCCTCCAGCAGATACTCATTTAAGGCGAATCCACTGCTTTCTGAAATGTGTTTTGCAATGGTGCACAGAACAGGCACTCACTTAGCGGATCTAATCCTTTCATGGCTCAGCTTGTTAATGTAGCAAACTGCTGAAAATGGGAAATGGATTCTTTAATGAGAACAGTCCCTTCATGGCTTTATTCTCCCAGTCCAACCCCCAGGCATTCATTCAAGTCCCCCCACGCCCGACCTCCCACGCCAGGATCAGGCACCCCCACTTCCCACCCAGCAAGCAGCCCATTTTCCAGCACGAAGTCCCCCATCTCTAGGCCCCTTGCTTCCCCACGACCTTCCCAGAGCCCTTGGAAGCTCACAAATAACAAAGGGGTGTAGGCAGTAAAAGATTCCCTTTCTCTGCTTCAGTTACCTCCTTCCTAAGCCTGAGCCCGTCTTTTCCTGTGCTTCAAATCTGACATGGTTATAGAGTGGAGCCTTTTCCTGATAAATTGCAAAGTAGCTAACACCCAGGGATTACATCTAAATTTATCAAATAAACACACTTTTGATATAAACATACTACCCAAGGTATTATAGATTTAATATCTTTCTTTAACATAGCTTTTGTACTATACAGGTTGAATATCCTTGGGACTAGACATGTTTTGGATATTTTTGGATTTTGGACTATTTGCATATACATAATGAGGTCTCTTGGGATGAGACTCAGGTCTCAACATTAAATTTATTTACGTTTCATATACACCTTATAGACATAGCCTGAAGGTAATTTTAGACAATACGATACTAATTTTGTGCATAGAACAATGTTTGTGTTAAGTGCTATTAAGACTTTTTTTAAAGTGTTAAGACTTTTCCACTGTGGCGTCATGTGAGTACTCAAAAAGTTTTAAATTTTGGAGCATTTTGGGTTTTGGATTTTCAGATTAAGGATGCTCAACCTGAATTGGATTTTATAATGATGCTGATTGCCAAGGGTTTCAAAATGGAGCCAATCAGTGAAAGTTAACTTGGACTCTGGTCTTTATTATTTTTCTTTTACGATTTTTACTCCTGTGGGTCTTCCTGAAGCTTTGGTACTTCTCTAGAAATCCACTCCAAAGAAAAAAAATCAGGCCTGGCACAGTGGTTCACATCTGTAATTCCAGCACTTTGGGAGGCCAAGGTGAGAGGATCACCTGAGGTCAGGAGTTCAAAACCAGCCTGGCCAACATGGCAAAATCCCATCTCTACTAAAAATACAAAAATTAGCTGGGCGTAGTGGTGCACACCTGTAATCCGAGCTTACCCGAGAGGCTGAGGCAGGAGAATCACTTGAACCCGGGAGGTGAAGGTTGCATTGAGCCGACCGAGATCGCCCCACTGCACTCCAGCCTGGGCGACAGAGGGAGACTGTCTCAAAAAAAAAAAAAAAAAAAAGTACTCGAAGCAGGTAAAGTTTAGGTTAAGAAGATATTCAAGATTACTTGGAAGTCATGACAGGGCAGCCTGGAGTTTGAAGTGTACATTTAAAAGAGAAAATGAGGATAGTTATGCCCATTTTGCCTTAGAGATAGGAAAGTAAATTATGTGTACATGAGCCCAGGTCTTTCCCTCATCCAA

SEQ ID NO: 145 - protein, 2318 aa, Homo sapiens
CCTGGTGGAACTTTACCAAATTACAAACACTGGCCTTACCCTCATCATTAAACACCAATTATTTGGCAAGTATTTAACAAATATTTACTAAATCTCTACAGTGAAAGCACAGGCACTGTGGTAGATGCCAGCAATACCACCATATATTAAGAAAGACATGGCCACTGTCCTTTGAGAATTTGCACTATCAATTATAATCTAAGATTGTTAGAAGAAAAGGCAAGAATGAAACAAGGCAATTTATTTCAAGTCTATGGTTATATATTAGAATGCCAGGTATTCCAAAATATTCATAATTACTAGTGCTCCTTTGACCTCTTACCTTGCAAAAGTTGCTGTACTGGGTAATGTTTGACTAGAATTACAGCTGAGAAATGAGTATTGATTGCACATTTTGCATTTTACAAAACCTGAGACGTAAACAATCAAAGGAACAACTTACAAGTCATTCTTCATCAGGGAACAGTTTATTATCTATATTCATTATCTGGGCTAGAATGGCTTCCATTGTAAAGGCAACGGATTAAAACAACTGGGACTCTTGCGGTTAGTCTGTTCCAAGACATAAAGCGAGGCCATGCCCTATTAGAATGCATCCACTGTCCCTGCTTTGACAAGTCTTTCAGTCAGCAACCTGCCAACTCTGTATCTGGACAAACTGCCAAATAGCATCACAGTAATAGGAGCATCTTCATGAATTTTCCTGTTTTCAGCATTAAAATGGAAAAAATGCTAAGCAAAACCCCTTTAGCATTCATTGTTTTTAGGGCTACTGGCTGCTTTTTTTATGTTTCTGTTTCCATTTTTTCAGTTTGCTTTTTTATCTGTTTTCCATGATAAAAAGCACCTCATTCACTTCCCCGTGGAAGGGCAATGCAGCTCCAAGGGAACATCTGTGAGGCCAATTAGCTGGGCTGGAAATGTGATATAATTGTTGTTTAAATATATTTAAATTACATGTTAATCACGATGTCATAATTTATAAGCTTTGAAAATAACTTTTTGTACTTGAGAGCCAAGCCAGATTTTACTTGTTTTTGCTGTTTTTAGTTTGAAACCAGCTCTTCTCATTTCTCTCTCCCTCAATTCCCCACACTTGAAGAGCTGAACTTTTAATATTGGAAAGAATGACAGCTGCAAGTAAATTGGTTGAGTAAAAATTAAGATCCTCACAGCAGTCAAAATGAGCTGGAGTGACCTTAAAGTTCGAAGCAGAACAAAGCAATGCTCTCAGTTAAAAGCTTTTGTTTTTCCATTGTGCTACTTTCTGCTGTCCATCAAAGTCCAGCTTTGCAGATCTTTAGGAAGCAGCACTGGGTGCATCTGTTCAATTAGCTGGTGAGGCGATTTACTGTCAGCAGGGCAGAGATAGAAAGAGGCGGGTTAGGAACTGGCAGGTGATACTGAGTTTGTTCCTGGTGGGGGGGTTTGTAAGGGTGATGGATGGAATGAGTTTAATTCTGTGGCCATATCGCTGGGAGATTGTATGATTAACTTGGACTTAAATGCCAGAGATTAAAGAGAAGGCAAGTATCAGTAAATGAATCAAATACGGTATTAAATGCACTTTTAAATACATCATGTTCTAAAATTTACTTTTTAGTTGAATGATAAATATTAGAACCTTTGTCTCATATGCACAGTATTTCTTATATTTGTATTATTTAATATTGTTCCTGAGAAATTTTATTTATTAAATAGATGGACTGTATCTTGTGATATTTTTAAAAATTATTATACAAATCTACTTTCGGAGGAAACAAAAATACAGGCCTAATGCCTAGCTTCTATCTAAATTAAACAGGTGATCAATGAGAGTCACTTTCTAATCTTTAAATAATTATTACTTTCAATAGTAATTATAAGATTACAATTTCTAGGTTCAAGAAATACTCCAAATTCCTTTGACTAAAATAAAATGTCTCTGTAAGACGTTGCTAATCCATCAGCACTAATTTATTATCCAGACACTTCCACATAGTAACTATTAAAGGTTCTCAACCTTTTATCCTCCCTGACATATCTGCTTAACACTCTGATGAGCATCTCCACACTTTCACAGGTCACATAGCAACATACAGAAAATGTTTATTGCATTATGTTATAATTATTGCATTATAAATTATAATTCCTGATGCATGGTTGTAACTCTGCATCTTTCTCACAACTGAGTTCAACATACCAGTGTTTTGAGACGTTTAGATTTAGGACCTTCATTTTTCACAGGGCAATCAGAAGGAAACAAACAGAATGTGTCCATATGTGCCAAACCCAATAATGGCTGGGAAAAGCCTACTGAGATTTCAGCTGCTGGCTGA

SEQ ID NO: 146 - DNA, 20 bp, Artificial
  Enhancer hs422 primer
agggggtcttcctaggttca

SEQ ID NO: 147 - DNA, 20 bp, Artificial
  Enhancer hs422 primer
ctcctgaaagccaagaccag

SEQ ID NO: 148 - DNA, 29 bp, Artificial
  Forward primer to introduce DlxI12b-betaglobin-Cre vector
ctctggatccacacagcttaatgattatc

SEQ ID NO: 149 - DNA, 30 bp, Artificial
  Reverse primer to introduce DlxI12b-betaglobin-Cre vector
gagaaccggtgcaggaattcatcgatgata

SEQ ID NO: 150 - DNA, 28 bp, Artificial
  Enhancer hs692 forward primer
acaaggatcccacatctcagtggctcat

SEQ ID NO: 151 - DNA, 29 bp, Artificial
  Enhancer hs692 reverse primer
tctaaccggtcagggtgtctgtgttgatg

SEQ ID NO: 152 - DNA, 28 bp, Artificial
  Enhancer hs1056 forward primer
gacaggatccgtccctcacagaactcag

SEQ ID NO: 153 - DNA, 28 bp, Artificial
  Enhancer hs1056 reverse primer
gacaaccggtgatgcctgccttgaagtc

SEQ ID NO: 154 - DNA, 30 bp, Artificial
  Enhancer hs1538 forward primer
tctaggatcctgctgcctcaaacaagaatg

SEQ ID NO: 155 - DNA, 30 bp, Artificial
  Enhancer hs1538 reverse primer
agttaccggtttggatgagggaaagacctg

SEQ ID NO: 156 - DNA, 28 bp, Artificial
  Beta-globin forward primer
ctataccggtagcccgggctgggcataa

SEQ ID NO: 157 - DNA, 29 bp, Artificial
  Beta-globin reverse primer
gagaaccggtcgccgcgctctgcttctgg

SEQ ID NO: 158 - DNA, 27 bp, Artificial
  hsp68 forward primer
gagaaccggtgcatcggcgcgccgacc

SEQ ID NO: 159 - DNA, 28 bp, Artificial
  hsp68 reverse primer
atattccggaggcgccgcgctctgcttc
